(19) United States
(12) Patent Application Publication
(10) Pub. No.: US 2011/0167517 A1
(43) Pub. Date: Jul. 7, 2011

(54) IDENTIFICATION OF DIURNAL RHYTHMS IN PHOTOSYNTHETIC AND NON-PHOTSYNTHETIC TISSUES FROM ZEA MAYS AND USE IN IMPROVING CROP PLANTS

(75) Inventors: Olga N. Danilevskaya, Johnston, IA (US); Jeffrey E. Habben, Urbandale, IA (US); Kevin R. Hayes, Urbandale, IA (US); Carl R. Simmons, Des Moines, IA (US); Stephane D. Deschamps, Hockessin, DE (US)

(73) Assignee: PIONEER HI-BRED INTERNATIONAL, INC., Johnston, IA (US)

(21) Appl. No.: 12/985,413

(22) Filed: Jan. 6, 2011

Related U.S. Application Data
(60) Provisional application No. 61/292,572, filed on Jan. 6, 2010.
(60) Provisional application No. 61/302,389, filed on Feb. 8, 2010.
(60) Provisional application No. 61/362,382, filed on Jul. 8, 2010.

(51) Int. Cl. A01H 5/00; C07H 21/04; C07K 14/415; A01H 5/10; C12N 15/82; C12N 5/10; C12Q 1/68

(52) U.S. Cl. 800/278; 536/23.6; 530/376; 800/298; 800/320.1; 800/320.3; 800/320.2; 800/306; 800/314; 800/320; 800/312; 536/24.1; 800/317.4; 435/320.1; 435/419; 435/6.1

(57) ABSTRACT

The present disclosure provides polynucleotide sequences relating to the diurnal cycling in maize leaf and ear tissues. The disclosure provides polynucleotide sequences and the use of encoded polypeptides associated with the oscillation. The disclosed sequences are responsible for controlling plant growth, source-sink relationships and yield in crop plants.

### CROSS REFERENCE

[0001] This utility application claims the benefit U.S. Provisional Application No. 61/292,572, filed Jan. 6, 2010, U.S. Provisional Application No. 61/302,389, filed Feb. 8, 2010 and U.S. Provisional Application No. 61/362,382, filed Jul. 8, 2010, all of which is incorporated herein by reference.

### FIELD OF THE INVENTION

[0002] The disclosure relates generally to the field of molecular biology.

### BACKGROUND OF THE INVENTION

[0003] The day-night cycle is a major environmental cue that controls daily and seasonal rhythms in plants. Diurnal light-dark transitions entrain the internal circadian clock that generates rhythms that are self-sustained (free-running) under constant light conditions. A simplified model of the clock is comprised by three basic components: an input pathway that senses light; a core oscillator that is the transcriptional machinery generating rhythms; and output pathways that control various developmental and metabolic processes, resulting in the appropriate physiological adaptations to the day-night cycle (Barak, et al., (2000) Trends Plant Sci 5:517-522; Harmer, (2009) Annu Rev Plant Biol 60:357-377). The proper synchronization of the internal clock and external light/dark cycles result in better plant fitness, survival, competitive advantage (Dodd, et al., (2005) Science 309:630-633) and growth vigor (Ni, et al., (2009) Nature 457:327-331).

[0004] The genetic architecture of the plant circadian system has thus far been mostly elucidated in Arabidopsis (Mas, (2008) Trends Cell Biol 18:273-281). The input pathways are comprised of two sets of photoreceptors, the red/far-red sensing phytochromes (PHYA-E) and the UV-A/blue-light sensing cryptochromes (CRY1 and CRY2), which percept light during the day and send signals to the core oscillator (Nemhauser, (2008) Curr Opin Plant Biol 11:4-8). The core oscillator genes form interlocking transcriptional feedback loops (Harmer and McClung, (2009) Science 323:1440-1441). The morning loop, consists of the MYB-like transcription factors CCA1 (CIRCADIAN CLOCK ASSOCIATED) and LHY (LATE ELONGATED HYPOCOTYL), which participate in regulation of two different loops. In the morning loop, CCA1/LHY negatively regulate transcription of the pseudo-response regulator TOC1 (TIMING OF CAB EXPRESSION 1) and the TCP-like transcription factor CHE (CCA1 HIKING EXPEDITION). TOC1/CHE form a complex that positively regulates transcription of CCA1/LHY (Pruneda-Paz, et al., (2009) Science 323:1481-1485). In the day loop, CCA1/LHY positively regulates transcription of the PRR7 and PRR9 (PSEUDO-RESPONSE REGULATORS) both of which negatively regulate CCA1/LHY. In the evening loop, TOC1/CHE works as a negative regulator of GI (GIGANTIA), itself a positive regulator of TOC1. The evening gene ZTL (ZEITLUPE, a protein-degrading F-box protein), involved in degradation of TOC1 and PRR3 proteins, provides regulation of the core clock components at the protein level (Mas, et al., (2003) Nature 426:567-570). The multiple interlocking transcription loops maintain a robust yet flexible genetic machinery (Harmer (2009))

[0005] The circadian clock generates rhythmic outputs that regulate many plant developmental and physiological processes including: growth (Nozue, et al., (2007) Nature 448:358-361; Nozue and Maloof, (2006) Plant Cell Environ 29:396-408), flowering time, tuberization in annuals, growth cessation and bud set in perennials (Lagercrantz, (2009) J Exp Bot 60:2501-2515), photosynthesis (Sun, et al., (2003) Plant Mol Biol 53:467-478), nitrogen uptake (Gutierrez, et al., (2008) Proc Natl Acad Sci USA 105:4939-4944) and hormone signaling and stress response (Covington and Harmer, (2007) PLoS Biol 5:e222). However, knowledge of the molecular nodes that link the circadian clock with output pathways are just now emerging. So far the best understood connection is the photoperiod regulation of flowering time in Arabidopsis and rice. The Arabidopsis clock gene GI and its rice homologue OsGI promotes expression of the transcription factors CO (CONSTANS) and OsCO (Hd1, HEADING1), which control transcription of the downstream floral activator FT (FLOWERING LOCUS T) in Arabidopsis and its homologous gene Hd3a (HEADING 3a) in rice (Michaels, (2009) Curr Opin Plant Biol 12:75-80, Tsuji and Komiya, (2008) Rice 1:25-35). The photoperiod sensitive pathways ensure flowering under favorable conditions.

[0006] Several publications identified molecular connections between the Arabidopsis core oscillators and a broad range of plant physiological processes. Rhythmic hypocotyl growth is promoted by positive action of two basic helix-loop-helix transcription factors, PIF4 and PIF5 (PHYTOCHROM-INERACTING FACTOR) whose transcript levels are regulated by CCA1 (Nozue, et al., (2007) Nature 448:358-361). The hypocotyl growth is also independently regulated by free levels of the phytohormone auxin, produced by the auxin biosynthetic gene YUCCAS, that is controlled directly by the clock-dependent Myb-like transcription factor RVE1 (REVEILLE 1) (Rawat, et al., (2009) Proc Natl Acad Sci USA 106:16883-16888). This is a direct link between circadian oscillators and the auxin networks that coordinate seedling growth in Arabidopsis. Output pathways of PPR9/7/5 genes are related to maintenance of the central metabolism, mainly in mitochondria, and in particular the tricarboxylic acid (TCA) cycle (Fukushima, et al., (2009) Proc Natl Acad Sci USA 106:7251-7256). TOC1 is also linked with the stress-related ABA hormone connecting the circadian clocks with plant responses to drought (Legnaioli, et al., (2009) The EMBO Journal 28:3745-3757).

[0007] The use of microarray technology has uncovered the pervasive influence of circadian rhythms on gene transcription in Arabidopsis. These studies have mainly focused on light-sensing tissues, such as Arabidopsis rosettes. Up to 35% of Arabidopsis genes are circadian-regulated in green tissues (Covington, et al., (2008) Genome Biol 9:R130; Harmer, et al., (2000) Science 290:2110-2113; Ptitsyn, (2008) BMC Bioinformatics 9(9):S18). While animal models have shown that nearly every tissue has a large circadian component to its transcriptional program, diverse plant tissues have not yet been systematically evaluated as to the relative contribution of diurnal light cycles on transcription (Ptitsyn, et al., (2006) PLoS Comput Biol 2:e16). In the pre-genomic era diurnal changes were observed in maize leaf photosynthesis and leaf elongation rates, which were the greatest at midday (Kalt-Torres and Huber, (1987) Plant Physiol 83:294-298, Kalt-Torres, et al., (1987) Plant Physiol 83:283-288, Usuda, et al., (1987) Plant Physiol 83:289-293). Diurnal oscillation of the endosperm-specific transcription factor O2 (Opaque 2) was also found in non-photosynthetic kernels, and it was proposed that O2 activity is controlled by diurnal metabolite flux (Ciceri, et al., (1999) Plant Physiol 121:1321-1328). Diurnal and circadian rhythms were demonstrated for maize homologues of GI (gigz1) and CO (conz1), which are direct outputs of the circadian clock in the photoperiod pathway controlling Arabidopsis flowering time (Miller, et al., (2008) Planta 227:1377-1388), even though temperate maize is a day-neutral plant whose flowering is not regulated by the day length.

[0008] This study identified two TOC1 homologues, ZmTOCa and ZmTOCb, which mapped to chromosome 5 and 4, respectively. Transcription of both genes peaks at 6 μm, consistent with Arabidopsis TOC1 gene expression. TOC1 is a member of the pseudo-response regulator (PRR) family composed of evolutionarily conserved five PRR genes in Arabidopsis and rice (Murakami, et al., (2007) Biosci Biotechnol Biochem 71:1107-1110; Murakami, et al., (2003) Plant Cell Physiol 44:1229-1236). In addition to two ZmTOC1 homologues, the study also identified ZmPRR73, ZmPRR37 and ZmPRR59 that were named after rice PRR genes based on the level of sequence similarly (Murakami, et al., (2003)). Also identified were two ZEITLUPE homologues (Kim, et al., (2007) Nature 449:356-360), ZmZTLa and ZmZTLb, which mapped to chromosome 2 and 4. Two maize orthologs of GIGANTIA, gigz1A and gigz1B, were described previously (Miller, et al., (2008) Planta 227:1377-1388) and are here confirmed their oscillation in both ears and leaves. The majority of the known core components cycle in both Agilent (Agilent Technologies, Inc., Life Sciences and Chemical Analysis, 2850 Centerville Road, Wilmington, Del. 19808-1610, USA) and Illumina (Illumina, Inc., 9885 Towne Centre Drive, San Diego, Calif. 92121 USA), analyses. Cycling of the core components ZmCCA, ZmLHY, ZmTOC1a and ZmTOC1b were further confirmed via RT-PCR analysis. The amplitudes of the core components is attenuated in the developing ear when compared with leaf tissue, but still robust. These data show that the majority of the plant core oscillator system is functioning in non-photosynthetic tissues such as ear, but the oscillator output is apparently largely isolated from the transcriptional machinery affecting downstream diurnal expression changes.

[0009] Components of the core clock mechanism and proximal signaling mechanism emanating from it, could be modified in such manner as to positively affect crop performance, as by for example shifting or extending the relationship between sources and sinks such as leaves and ears. Wholesale genetic complementation of diurnal patterns from different germplasm sources has been shown to augment the combined diurnal patterns and apparent fitness (Ni, (2009)).

### BRIEF DESCRIPTION OF THE DRAWINGS

[0010] FIG. 1: Diurnal Core Clock Components functioning in maize, chromosome location and time of peak expression levels.

[0011] FIG. 2: Validation of diurnal expression for ZmCCA1, ZmLHY, ZmTOC1a and ZmTOC1b by qRT-PCR.

[0012] FIG. 3: Diurnal expressed genes in ears, chromosome location and time of peak expression levels.

[0013] FIG. 4: Exon/Intron structures of ZmCCA1 and ZmLHY genes

[0014] FIG. 5: Diurnal Patterns for Temporally Enriched Gene Functional Terms

### BRIEF SUMMARY OF THE INVENTION

[0015] No systematic study of diurnal/circadian transcriptional patterns in maize has yet been undertaken. The present study was initiated to examine the extent that the diurnal cycle plays in regulating gene transcription in maize using modern genome-wide profiling technologies. Field experiments were designed under natural undisturbed conditions and sampled both a photosynthetic tissue, leaf and a non-photosynthetic tissue, developing ear. Thousands of transcripts that markedly cycle in the maize leaves were identified. In non-photosynthetic ears however just a small set of genes, as little as 45, were clearly diurnally cycling. Many of these are maize homologues of Arabidopsis core oscillator genes, indicating that core circadian genes are conserved in maize and diurnally expressed in both photosynthetic and non-photosynthetic tissues.

[0016] A number of maize diurnally regulated genes were identified during the analyses. A total of 471 sequences, including those from immature ear, those having high amplitude/magnitude cycling in leaf tissue, and diverse sequences associated with NUE and Carbon::Nitrogen functions. The sequences contain ORFs, encoded polypeptides, and their associated promoters.

[0017] The following list includes some of the embodiments of the disclosure:
[0018] 1. An isolated polynucleotide selected from the group consisting of:
   [0019] a. a polynucleotide having at least 90% sequence identity, as determined by the GAP algorithm under default parameters, to the full length sequence of a polynucleotide selected from the group consisting of SEQ ID NOS: 1, 2, 3, 4, 5, 6, 7, 8, 20, 184, 186, 188, 190, 192, 194, 196, 198, 200, 202, 204, 206, 208, 210, 212, 214, 216, 218, 220, 222, 224, 226, 228, 230, 232, 234, 236, 238, 240, 242, 244, 246, 248, 250, 252, 254, 256, 258, 260, 262, 264, 266, 268, 270, 272, 274, 276, 278, 280, 282, 284, 286, 288, 290, 292, 294, 296, 298, 300, 302, 304, 306, 308, 310, 312, 314, 316, 318, 320, 322, 324, 326, 328, 330, 332, 334, 336, 338, 340, 342, 344, 346, 348, 350, 352, 354, 356, 358, 360, 362, 364, 366, 368, 370, 372, 374, 376, 378, 380, 382, 384, 386, 388, 390, 392, 394, 396, 398, 400, 402, 404, 406, 408, 410, 412, 414, 416, 418, 420, 422, 424, 426, 428, 430, 432, 434, 436, 438, 440, 442, 444, 446, 448, 450, 452, 454, 456, 458, 460, 462, 464, 466, 468 and 470; wherein the polynucleotide encodes a polypeptide that functions as a modifier of diurnal activity;
   [0020] b. a polynucleotide selected from the group consisting of SEQ ID NOS: 1, 2, 3, 4, 5, 6, 7, 8, 20, 184, 186, 188, 190, 192, 194, 196, 198, 200, 202, 204, 206, 208, 210, 212, 214, 216, 218, 220, 222, 224, 226, 228, 230, 232, 234, 236, 238, 240, 242, 244, 246, 248, 250, 252, 254, 256, 258, 260, 262, 264, 266, 268, 270, 272, 274, 276, 278, 280, 282, 284, 286, 288, 290, 292, 294, 296, 298, 300, 302, 304, 306, 308, 310, 312, 314, 316, 318, 320, 322, 324, 326, 328, 330, 332, 334, 336, 338, 340, 342, 344, 346, 348, 350, 352, 354, 356, 358, 360, 362, 364, 366, 368, 370, 372, 374, 376, 378, 380, 382, 384, 386, 388, 390, 392, 394, 396, 398, 400, 402, 404, 406, 408, 410, 412, 414, 416, 418, 420, 422, 424, 426, 428, 430, 432, 434, 436, 438, 440, 442, 444, 446, 448, 450, 452, 454, 456, 458, 460, 462, 464, 466, 468 and 470;
   [0021] c. a polynucleotide which is fully complementary to the polynucleotide of (a) or (b);
   [0022] d. a polypeptide encoded by the polynucleotide of (a) or (b); and
   [0023] e. a polypeptide having at least 90% sequence identity, as determined by the GAP algorithm under default parameters, to the full length sequence of a polypeptide selected from the group consisting of SEQ ID NOS; 185, 187, 189, 191, 193, 195, 197, 199, 201, 203, 205, 207, 209, 211, 213, 215, 217, 219, 221, 223, 225, 227, 229, 231, 233, 235, 237, 239, 241, 243, 245, 247, 249, 251, 253, 255, 257, 259, 261, 263, 265, 267, 269, 271, 273, 275, 277, 279, 281, 283, 285, 287, 289, 291, 293, 295, 297, 299, 301, 303, 305, 307, 309, 311, 313, 315, 317, 319, 321, 323, 325, 327, 329, 331, 333, 335, 357, 359, 361, 363, 365, 367, 369, 371, 373, 375, 377, 379, 381, 383, 385, 387, 389, 391, 393, 395, 397, 399, 401, 403, 405, 407, 409, 411, 413, 415, 417, 419, 421, 423, 425, 427, 429, 431, 433, 435, 437, 439, 441, 443, 445, 447, 449, 451, 453, 455, 457, 459, 461, 463, 465, 467, 467, 469 and 471.
[0024] 2. A recombinant expression cassette, comprising the polynucleotide of claim 1, wherein the polynucleotide is operably linked, in sense or anti-sense orientation, to a promoter.
[0025] 3. A host cell comprising the expression cassette of claim 2.
[0026] 4. A transgenic plant comprising the recombinant expression cassette of claim 2.
[0027] 5. The transgenic plant of claim 4, wherein said plant is a monocot.
[0028] 6. The transgenic plant of claim 4, wherein said plant is a dicot.
[0029] 7. The transgenic plant of claim 4, wherein said plant is selected from the group consisting of: maize, soybean, sunflower, sorghum, canola, wheat, alfalfa, cotton, rice, barley, millet, peanut, sugar cane and cocoa.
[0030] 8. A transgenic seed from the transgenic plant of claim 4.
[0031] 9. A method of modulating diurnal rhythm in plants, comprising:
   [0032] a. introducing into a plant cell a recombinant expression cassette comprising the polynucleotide of claim 1 operably linked to a promoter; and
   [0033] b. culturing the plant under plant cell growing conditions; wherein the diurnal in said plant cell is modulated.
[0034] 10. The method of claim 9, wherein the plant cell is from a plant selected from the group consisting of: maize, soybean, sunflower, sorghum, canola, wheat, alfalfa, cotton, rice, barley, millet, peanut, sugar cane and cocoa.
[0035] 11. A method of modulating the whole plant or diurnal rhythm in a plant, comprising:
   [0036] a. introducing into a plant cell a recombinant expression cassette comprising the polynucleotide of claim 1 operably linked to a promoter;
   [0037] b. culturing the plant cell under plant cell growing conditions; and
   [0038] c. regenerating a plant form said plant cell; wherein the diurnal rhythm in said plant is modulated.
[0039] 12. The method of claim 11, wherein the plant is selected from the group consisting of: maize, soybean, sorghum, canola, wheat, alfalfa, cotton, rice, barley, millet, peanut and cocoa.
[0040] 13. A product derived from the method of processing of transgenic plant tissues expressing an isolated polynucleotide encoding a diurnally functioning gene, the method comprising:
   [0041] a. transforming a plant cell with a recombinant expression cassette comprising a polynucleotide having at least 90% sequence identity to the full length sequence of a polynucleotide selected from the group consisting of SEQ ID NO: 1, 2, 3, 4, 5, 6, 7, 8, 20, 40, 184, 186, 188, 190, 192, 194, 196, 198, 200, 202, 204, 206, 208, 210, 212, 214, 216, 218, 220, 222, 224, 226, 228, 230, 232, 234, 236, 238, 240, 242, 244, 246, 248, 250, 252, 254, 256, 258, 260, 262, 264, 266, 268, 270, 272, 274, 276, 278, 280, 282, 284, 286, 288, 290, 292, 294, 296, 298, 300, 302, 304, 306, 308, 310, 312, 314, 316, 318, 320, 322, 324, 326, 328, 330, 332, 334, 336, 338, 340, 342, 344, 346, 348, 350, 352, 354, 356, 358, 360, 362, 364, 366, 368, 370, 372, 374, 376, 378, 380, 382, 384, 386, 388, 390, 392, 394, 396, 398, 400, 402, 404, 406, 408, 410, 412, 414, 416, 418, 420, 422, 424, 426, 428, 430, 432, 434, 436, 438, 440, 442, 444, 446, 448, 450, 452, 454, 456, 458, 460, 462, 464, 466, 468 and 470; operably linked to a promoter; and
   [0042] b. culturing the transformed plant cell under plant cell growing conditions; wherein the growth in said transformed plant cell is modulated;
   [0043] c. growing the plant cell under plant-forming conditions to express the polynucleotide in the plant tissue; and
   [0044] d. processing the plant tissue to obtain a product.
[0045] 14. The transgenic plant of claim 13, wherein the plant is a monocot.
[0046] 15. The transgenic plant of claim 13, wherein the plant is selected from the group consisting of: maize, soybean, sunflower, sorghum, canola, wheat, alfalfa, cotton, rice, barley, sugar cane and millet.
[0047] 16. The transgenic plant of claim 4, where overexpression of the polynucleotide leads to which has improved plant growth as compared to non-transformed plants.
[0048] 17. The transgenic plant of claim 4, where the plant exhibits improved source-sink relationships as compared to non-transformed plants.
[0049] 18. The transgenic plant of claim 4, where the plant has improved yield as compared to non-transformed plants.
[0050] 19. A regulatory polynucleotide molecule comprising a sequence selected from the group consisting of: (a) SEQ ID NOS: 31-183; (b) a nucleic acid fragment that comprises at least 50-100 contiguous nucleotides of one of SEQ ID NOS: 31-183 and wherein the fragment comprises one or more of the diurnal regulatory elements listed in Table 2 and (c) a nucleic acid sequence comprising at least 90% identity to about 500-1000 contiguous nucleotides of one of SEQ ID NOS: 31-183 as determined by the GAP algorithm under default parameters.
[0051] 20. A chimeric polynucleotide molecule comprising the nucleic acid fragment of claim 19.
[0052] 21. The chimeric molecule of claim 20 comprises the diurnal regulatory element and a tissue specific expression element.
[0053] 22. The chimeric molecule of claim 21, wherein the tissue specific expression element is selected from the group consisting of root specific, bundle sheath cell specific, leaf specific and embryo specific.
[0054] 23. The regulatory polynucleotide molecule of claim 19, wherein said regulatory polynucleotide molecule is a promoter.
[0055] 24. A construct comprising the regulatory molecule of claim 19 operably linked to a heterologous polynucleotide molecule, wherein the heterologous molecule confers a trait of interest.
[0056] 25. The construct of claim 24, wherein the trait of interest is selected from the group consisting of drought tolerance, freezing tolerance, chilling or cold tolerance, disease resistance and insect resistance.
[0057] 26. The construct of claim 24, wherein the heterologous molecule functions in source-sink metabolism.
[0058] 27. A transgenic plant transformed with the regulatory molecule of claim 19.
[0059] 28. The transgenic plant of claim 27 is monocotyledonous.
[0060] 29. The transgenic plant of claim 27 is selected from the group consisting of maize, soybean, canola, cotton, sunflower, alfalfa, sugar beet, wheat, rye, rice, sugarcane, oat, barley, turf grass, sorghum, millet, tomato, pigeon pea, vegetable, fruit tree and forage grass.
[0061] 30. A method of increasing yield of a plant, the method comprising expressing a heterologous polynucleotide of interest under the control of the regulatory molecule of claim 19.
[0062] 31. The method of claim 30, wherein the heterologous polynucleotide is a diurnally regulated plant gene.
[0063] 32. A method of increasing abiotic stress tolerance in a plant, the method comprising expressing one or more polynucleotides that confer abiotic stress tolerance in plants under the control of the regulatory molecule of claim 19.
[0064] 33. The method of claim 32, wherein the abiotic stress tolerance is selected from the group consisting of drought tolerance, freezing tolerance and chilling or cold tolerance.
[0065] 34. The method of claim 33, wherein the polynucleotide that confers drought tolerance is expressed under the control of a regulatory element whose peak expression is around mid-day or late afternoon.
[0066] 35. The method of claim 33, wherein the polynucleotide that confers freezing or cold tolerance is expressed under the control of a regulatory element whose peak expression is around dawn or mid-morning.
[0067] 36. A method of reducing yield drag of transgenic gene expression, the method comprising expressing a transgene operably linked to a regulatory polynucleotide molecule comprising a sequence selected from the group consisting of: (a) SEQ ID NOS: 31-183; (b) a nucleic acid fragment that comprises at least 50-100 contiguous nucleotides of one of SEQ ID NOS: 31-183 and wherein the fragment comprises one or more of the diurnal regulatory elements listed in Table 2 and (c) a nucleic acid sequence comprising at least 90% identity to about 500-1000 contiguous nucleotides of one of SEQ ID NOS: 31-183 as determined by the GAP algorithm under default parameters.
[0068] 37. A method of screening for gene candidates involved in abiotic stress tolerance, the method comprising (a) identifying one or more gene candidates that exhibit yield drag under constitutive or tissue specific expression and (b) expressing the gene candidates under the control of the a regulatory molecule that directs diurnal expression pattern.
[0069] 38. The method of claim 37, wherein the regulatory molecule comprises a sequence selected from the group consisting of: (a) SEQ ID NOS: 31-183; (b) a nucleic acid fragment that comprises at least 50-100 contiguous nucleotides of one of SEQ ID NOS: 31-183 and wherein the fragment comprises one or more of the diurnal regulatory elements listed in Table 2 and (c) a nucleic acid sequence comprising at least 90% identity to about 500-1000 contiguous nucleotides of one of SEQ ID NOS: 31-183 as determined by the GAP algorithm under default parameters.

### DETAILED DESCRIPTION OF THE INVENTION

[0070] Unless defined otherwise, all technical and scientific terms used herein have the same meaning as commonly understood by one of ordinary skill in the art to which this disclosure belongs. Unless mentioned otherwise, the techniques employed or contemplated herein are standard methodologies well known to one of ordinary skill in the art. The materials, methods and examples are illustrative only and not limiting. The following is presented by way of illustration and is not intended to limit the scope of the disclosure.

[0071] The present disclosures now will be described more fully hereinafter with reference to the accompanying drawings, in which some, but not all embodiments of the disclosure are shown. Indeed, these disclosures may be embodied in many different forms and should not be construed as limited to the embodiments set forth herein; rather, these embodiments are provided so that this disclosure will satisfy applicable legal requirements. Like numbers refer to like elements throughout.

[0072] Many modifications and other embodiments of the disclosures set forth herein will come to mind to one skilled in the art to which these disclosures pertain having the benefit of the teachings presented in the foregoing descriptions and the associated drawings. Therefore, it is to be understood that the disclosures are not to be limited to the specific embodiments disclosed and that modifications and other embodiments are intended to be included within the scope of the appended claims. Although specific terms are employed herein, they are used in a generic and descriptive sense only and not for purposes of limitation.

[0073] The practice of the present disclosure will employ, unless otherwise indicated, conventional techniques of botany, microbiology, tissue culture, molecular biology, chemistry, biochemistry and recombinant DNA technology, which are within the skill of the art. Such techniques are explained fully in the literature. See, e.g., Langenheim and Thimann, BOTANY: PLANT BIOLOGY AND ITS RELATION TO HUMAN AFFAIRS, John Wiley (1982); CELL CULTURE AND SOMATIC CELL GENETICS OF PLANTS, vol. 1, Vasil, ed. (1984); Stanier, et al., THE MICROBIAL WORLD, 5^{th} ed., Prentice-Hall (1986); Dhringra and Sinclair, BASIC PLANT PATHOLOGY METHODS, CRC Press (1985); Maniatis, et al., MOLECULAR CLONING: A LABORATORY MANUAL (1982); DNA CLONING, vols. I and II, Glover, ed. (1985); OLIGONUCLEOTIDE SYNTHESIS, Gait, ed. (1984); NUCLEIC ACID HYBRIDIZATION, Hames and Higgins, eds. (1984) and the series METHODS IN ENZYMOLOGY, Colowick and Kaplan, eds, Academic Press, Inc., San Diego, Calif.

[0074] Units, prefixes and symbols may be denoted in their SI accepted form. Unless otherwise indicated, nucleic acids are written left to right in 5′ to 3′ orientation; amino acid sequences are written left to right in amino to carboxy orientation, respectively. Numeric ranges are inclusive of the numbers defining the range. Amino acids may be referred to herein by either their commonly known three letter symbols or by the one-letter symbols recommended by the IUPAC-IUB Biochemical Nomenclature Commission. Nucleotides, likewise, may be referred to by their commonly accepted single-letter codes. The terms defined below are more fully defined by reference to the specification as a whole.

[0075] In describing the present disclosure, the following terms will be employed and are intended to be defined as indicated below.

[0076] By “microbe” is meant any microorganism (including both eukaryotic and prokaryotic microorganisms), such as fungi, yeast, bacteria, actinomycetes, algae and protozoa, as well as other unicellular structures.

[0077] By “amplified” is meant the construction of multiple copies of a nucleic acid sequence or multiple copies complementary to the nucleic acid sequence using at least one of the nucleic acid sequences as a template. Amplification systems include the polymerase chain reaction (PCR) system, ligase chain reaction (LCR) system, nucleic acid sequence based amplification (NASBA, Cangene, Mississauga, Ontario), O-Beta Replicase systems, transcription-based amplification system (TAS) and strand displacement amplification (SDA). See, e.g., DIAGNOSTIC MOLECULAR MICROBIOLOGY: PRINCIPLES AND APPLICATIONS, Persing, et al., eds., American Society for Microbiology, Washington, D.C. (1993). The product of amplification is termed an amplicon.

[0078] The term “conservatively modified variants” applies to both amino acid and nucleic acid sequences. With respect to particular nucleic acid sequences, conservatively modified variants refer to those nucleic acids that encode identical or conservatively modified variants of the amino acid sequences. Because of the degeneracy of the genetic code, a large number of functionally identical nucleic acids encode any given protein. For instance, the codons GCA, GCC, GCG and GCU all encode the amino acid alanine. Thus, at every position where an alanine is specified by a codon, the codon can be altered to any of the corresponding codons described without altering the encoded polypeptide. Such nucleic acid variations are “silent variations” and represent one species of conservatively modified variation. Every nucleic acid sequence herein that encodes a polypeptide also describes every possible silent variation of the nucleic acid. One of ordinary skill will recognize that each codon in a nucleic acid (except AUG, which is ordinarily the only codon for methionine; one exception is Micrococcus rubens, for which GTG is the methionine codon (Ishizuka, et al., (1993) J. Gen. Microbiol. 139:425-32) can be modified to yield a functionally identical molecule. Accordingly, each silent variation of a nucleic acid, which encodes a polypeptide of the present disclosure, is implicit in each described polypeptide sequence and incorporated herein by reference.

[0079] As to amino acid sequences, one of skill will recognize that individual substitutions, deletions or additions to a nucleic acid, peptide, polypeptide or protein sequence which alters, adds or deletes a single amino acid or a small percentage of amino acids in the encoded sequence is a “conservatively modified variant” when the alteration results in the substitution of an amino acid with a chemically similar amino acid. Thus, any number of amino acid residues selected from the group of integers consisting of from 1 to 15 can be so altered. Thus, for example, 1, 2, 3, 4, 5, 7 or 10 alterations can be made. Conservatively modified variants typically provide similar biological activity as the unmodified polypeptide sequence from which they are derived. For example, substrate specificity, enzyme activity, or ligand/receptor binding is generally at least 30%, 40%, 50%, 60%, 70%, 80% or 90%, preferably 60-90% of the native protein for it's native substrate. Conservative substitution tables providing functionally similar amino acids are well known in the art.

[0080] The following six groups each contain amino acids that are conservative substitutions for one another:

[0081] 1) Alanine (A), Serine (S), Threonine (T);

[0082] 2) Aspartic acid (D), Glutamic acid (E);

[0083] 3) Asparagine (N), Glutamine (Q);

[0084] 4) Arginine (R), Lysine (K);

[0085] 5) Isoleucine (I), Leucine (L), Methionine (M), Valine (V); and

[0086] 6) Phenylalanine (F), Tyrosine (Y), Tryptophan (W).

See also, Creighton, PROTEINS, W.H. Freeman and Co. (1984).

[0087] As used herein, “consisting essentially of” means the inclusion of additional sequences to an object polynucleotide where the additional sequences do not selectively hybridize, under stringent hybridization conditions, to the same cDNA as the polynucleotide and where the hybridization conditions include a wash step in 0.1×SSC and 0.1% sodium dodecyl sulfate at 65° C.

[0088] By “encoding” or “encoded,” with respect to a specified nucleic acid, is meant comprising the information for translation into the specified protein. A nucleic acid encoding a protein may comprise non-translated sequences (e.g., introns) within translated regions of the nucleic acid, or may lack such intervening non-translated sequences (e.g., as in cDNA). The information by which a protein is encoded is specified by the use of codons. Typically, the amino acid sequence is encoded by the nucleic acid using the “universal” genetic code. However, variants of the universal code, such as is present in some plant, animal and fungal mitochondria, the bacterium Mycoplasma capricolumn (Yamao, et al., (1985) Proc. Natl. Acad. Sci. USA 82:2306-9) or the ciliate Macronucleus, may be used when the nucleic acid is expressed using these organisms.

[0089] When the nucleic acid is prepared or altered synthetically, advantage can be taken of known codon preferences of the intended host where the nucleic acid is to be expressed. For example, although nucleic acid sequences of the present disclosure may be expressed in both monocotyledonous and dicotyledonous plant species, sequences can be modified to account for the specific codon preferences and GC content preferences of monocotyledonous plants or dicotyledonous plants as these preferences have been shown to differ (Murray, et al., (1989) Nucleic Acids Res. 17:477-98 and herein incorporated by reference). Thus, the maize preferred codon for a particular amino acid might be derived from known gene sequences from maize. Maize codon usage for 28 genes from maize plants is listed in Table 4 of Murray, et al., supra.

[0090] As used herein, “heterologous” in reference to a nucleic acid is a nucleic acid that originates from a foreign species, or, if from the same species, is substantially modified from its native form in composition and/or genomic locus by deliberate human intervention. For example, a promoter operably linked to a heterologous structural gene is from a species different from that from which the structural gene was derived or, if from the same species, one or both are substantially modified from their original form. A heterologous protein may originate from a foreign species or, if from the same species, is substantially modified from its original form by deliberate human intervention.

[0091] By “host cell” is meant a cell, which contains a vector and supports the replication and/or expression of the expression vector. Host cells may be prokaryotic cells such as E. coli, or eukaryotic cells such as yeast, insect, plant, amphibian or mammalian cells. Preferably, host cells are monocotyledonous or dicotyledonous plant cells, including but not limited to maize, sorghum, sunflower, soybean, wheat, alfalfa, rice, cotton, canola, barley, millet and tomato. A particularly preferred monocotyledonous host cell is a maize host cell.

[0092] The term “hybridization complex” includes reference to a duplex nucleic acid structure formed by two single-stranded nucleic acid sequences selectively hybridized with each other.

[0093] The term “introduced” in the context of inserting a nucleic acid into a cell, means “transfection” or “transformation” or “transduction” and includes reference to the incorporation of a nucleic acid into a eukaryotic or prokaryotic cell where the nucleic acid may be incorporated into the genome of the cell (e.g., chromosome, plasmid, plastid or mitochondrial DNA), converted into an autonomous replicon or transiently expressed (e.g., transfected mRNA).

[0094] The terms “isolated” refers to material, such as a nucleic acid or a protein, which is substantially or essentially free from components which normally accompany or interact with it as found in its naturally occurring environment. The isolated material optionally comprises material not found with the material in its natural environment. Nucleic acids, which are “isolated”, as defined herein, are also referred to as “heterologous” nucleic acids. Unless otherwise stated, the term “diurnal nucleic acid” means a nucleic acid comprising a polynucleotide (“diurnal polynucleotide”) encoding a diurnal polypeptide.

[0095] As used herein, “nucleic acid” includes reference to a deoxyribonucleotide or ribonucleotide polymer in either single- or double-stranded form and unless otherwise limited, encompasses known analogues having the essential nature of natural nucleotides in that they hybridize to single-stranded nucleic acids in a manner similar to naturally occurring nucleotides (e.g., peptide nucleic acids).

[0096] By “nucleic acid library” is meant a collection of isolated DNA or RNA molecules, which comprise and substantially represent the entire transcribed fraction of a genome of a specified organism. Construction of exemplary nucleic acid libraries, such as genomic and cDNA libraries, is taught in standard molecular biology references such as Berger and Kimmel, GUIDE TO MOLECULAR CLONING TECHNIQUES, from the series METHODS IN ENZYMOLOGY, vol. 152, Academic Press, Inc., San Diego, Calif. (1987); Sambrook, et al., MOLECULAR CLONING: A LABORATORY MANUAL, 2^{nd} ed., vols. 1-3 (1989) and CURRENT PROTOCOLS IN MOLECULAR BIOLOGY, Ausubel, et al., eds, Current Protocols, a joint venture between Greene Publishing Associates, Inc. and John Wiley & Sons, Inc. (1994 Supplement).

[0097] As used herein “operably linked” includes reference to a functional linkage between a first sequence, such as a promoter and a second sequence, wherein the promoter sequence initiates and mediates transcription of the DNA sequence corresponding to the second sequence. Generally, operably linked means that the nucleic acid sequences being linked are contiguous and, where necessary to join two protein coding regions, contiguous and in the same reading frame.

[0098] As used herein, the term “plant” includes reference to whole plants, plant organs (e.g., leaves, stems, roots, etc.), seeds and plant cells and progeny of same. Plant cell, as used herein includes, without limitation, seeds suspension cultures, embryos, meristematic regions, callus tissue, leaves, roots, shoots, gametophytes, sporophytes, pollen and microspores. The class of plants, which can be used in the methods of the disclosure, is generally as broad as the class of higher plants amenable to transformation techniques, including both monocotyledonous and dicotyledonous plants including species from the genera: Cucurbita, Rosa, Vitis, Juglans, Fragaria, Lotus, Medicago, Onobrychis, Trifolium, Trigonella, Vigna, Citrus, Linum, Geranium, Manihot, Daucus, Arabidopsis, Brassica, Raphanus, Sinapis, Atropa, Capsicum, Datura, Hyoscyamus, Lycopersicon, Nicotiana, Solanum, Petunia, Digitalis, Majorana, Ciahorium, Helianthus, Lactuca, Bromus, Asparagus, Antirrhinum, Heterocallis, Nemesis, Pelargonium, Panieum, Pennisetum, Ranunculus, Senecio, Salpiglossis, Cucumis, Browaalia, Glycine, Pisum, Phaseolus, Lolium, Oryza, Avena, Hordeum, Secale, Allium and Triticum. A particularly preferred plant is Zea mays.

[0099] As used herein, “yield” includes reference to bushels per acre of a grain crop at harvest, as adjusted for grain moisture (15% typically). Grain moisture is measured in the grain at harvest. The adjusted test weight of grain is determined to be the weight in pounds per bushel, adjusted for grain moisture level at harvest. As used herein, improved “source-sink” relationship includes reference to a trait associated with an improvement of the ratio of assimilate supply (i.e., source) and demand (i.e., sink) during grain filling.

[0100] As used herein, “polynucleotide” includes reference to a deoxyribopolynucleotide, ribopolynucleotide or analogs thereof that have the essential nature of a natural ribonucleotide in that they hybridize, under stringent hybridization conditions, to substantially the same nucleotide sequence as naturally occurring nucleotides and/or allow translation into the same amino acid(s) as the naturally occurring nucleotide(s). A polynucleotide can be full-length or a subsequence of a native or heterologous structural or regulatory gene. Unless otherwise indicated, the term includes reference to the specified sequence as well as the complementary sequence thereof. Thus, DNAs or RNAs with backbones modified for stability or for other reasons are “polynucleotides” as that term is intended herein. Moreover, DNAs or RNAs comprising unusual bases, such as inosine, or modified bases, such as tritylated bases, to name just two examples, are polynucleotides as the term is used herein. It will be appreciated that a great variety of modifications have been made to DNA and RNA that serve many useful purposes known to those of skill in the art. The term polynucleotide as it is employed herein embraces such chemically, enzymatically or metabolically modified forms of polynucleotides, as well as the chemical forms of DNA and RNA characteristic of viruses and cells, including inter alia, simple and complex cells.

[0101] The terms “polypeptide,” “peptide” and “protein” are used interchangeably herein to refer to a polymer of amino acid residues. The terms apply to amino acid polymers in which one or more amino acid residue is an artificial chemical analogue of a corresponding naturally occurring amino acid, as well as to naturally occurring amino acid polymers.

[0102] As used herein “promoter” includes reference to a region of DNA upstream from the start of transcription and involved in recognition and binding of RNA polymerase and other proteins (e.g., transcription factors) to initiate transcription. A “plant promoter” is a promoter capable of initiating transcription in plant cells. Exemplary plant promoters include, but are not limited to, those that are obtained from plants, plant viruses and bacteria which comprise genes expressed in plant cells such Agrobacterium or Rhizobium. Examples are promoters that preferentially initiate transcription in certain tissues, such as leaves, roots, seeds, fibres, xylem vessels, tracheids or sclerenchyma. Such promoters are referred to as “tissue preferred.” A “cell type” specific promoter primarily drives expression in certain cell types in one or more organs, for example, vascular cells in roots or leaves. An “inducible” or “regulatable” promoter is a promoter, which is under environmental control. Examples of environmental conditions that may effect transcription by inducible promoters include anaerobic conditions or the presence of light. Another type of promoter is a developmentally regulated promoter, for example, a promoter that drives expression during pollen development. Tissue preferred, cell type specific, developmentally regulated and inducible promoters constitute the class of “non-constitutive” promoters. A “constitutive” promoter is a promoter, which is active under most environmental conditions.

[0103] As used herein, “regulatory element” or “regulatory polynucleotide” refers to nucleic acid fragment that modulates the expression of a transcribable polynucleotide that is associated with the regulatory element. Such association can occur in cis. A plant promoter can also be used as a regulatory element for modulating the expression of a particular gene or genes that are operably associated to the promoters. When operably associated to a transcribable polynucleotide molecule, a regulatory element affects the transcriptional pattern of the transcribable polynucleotide molecule. “cis-element” or “cis-acting element” refers to a cis-acting transcriptional regulatory element that affects gene expression. A cis-element may function to bind transcription factors, trans-acting proteins that modulate transcription. The diurnal promoters disclosed herein may contain one or more cis-elements that provide diurnal gene expression pattern.

[0104] The plant promoters and the regulatory elements disclosed herein can include nucleotide sequences generated by promoter engineering, i.e., combination of known promoters and/or regulatory elements to produce artificial, synthetic, chimeric or hybrid promoters. Such promoters can also combine cis-elements from one or more promoters, for example, by adding a heterologous tissue specific regulatory element to a promoter that contains diurnal expression regulatory elements. Thus, the design, construction, and use of chimeric or hybrid promoters comprising at least one cis-element of the promoters disclosed herein for modulating the expression of operably linked polynucleotide sequences is contemplated.

[0105] The promoter sequences disclosed herein including SEQ ID NOS: 31-183 and fragments there of that include for example, 50, 100, 150, 200, 300, 400, 500, 600, 700, 800, 900, 1000, 1100, 1200, 1300, 1400, 1500, 1600, 1700, 1800, 1900, 2000 and up to 2500 contiguous nucleotides thereof and about 80% or 85% or 90% or 95% or 99% identical to those fragments are contemplated for use in modulating the expression pattern of one or more heterologous genes. The term “heterologous” in this context means that the expression of the nucleotide of interest is modulated by a promoter sequence or a fragment thereof that is not the nucleotide's own promoter. Deletion constructs of the various promoter sequences disclosed herein are readily made by one of ordinary skill in the art following the guidance provided herein. About 25-50 contiguous nucleotides that flank the 3′ or the 5′ ends of the disclosed regulatory elements are selected for modulation of gene expression. Mutational analysis are also performed to enhance the specificity of diurnal regulation.

[0106] The term “diurnal polypeptide” refers to one or more amino acid sequences. The term is also inclusive of fragments, variants, homologs, alleles or precursors (e.g., preproproteins or proproteins) thereof. A “diurnal protein” comprises a diurnal polypeptide. Unless otherwise stated, the term “diurnal nucleic acid” means a nucleic acid comprising a polynucleotide (“diurnal polynucleotide”) encoding a diurnal polypeptide.

[0107] As used herein “recombinant” includes reference to a cell or vector, that has been modified by the introduction of a heterologous nucleic acid or that the cell is derived from a cell so modified. Thus, for example, recombinant cells express genes that are not found in identical form within the native (non-recombinant) form of the cell or express native genes that are otherwise abnormally expressed, under expressed or not expressed at all as a result of deliberate human intervention. The term “recombinant” as used herein does not encompass the alteration of the cell or vector by naturally occurring events (e.g., spontaneous mutation, natural transformation/transduction/transposition) such as those occurring without deliberate human intervention.

[0108] As used herein, a “recombinant expression cassette” is a nucleic acid construct, generated recombinantly or synthetically, with a series of specified nucleic acid elements, which permit transcription of a particular nucleic acid in a target cell. The recombinant expression cassette can be incorporated into a plasmid, chromosome, mitochondrial DNA, plastid DNA, virus or nucleic acid fragment. Typically, the recombinant expression cassette portion of an expression vector includes, among other sequences, a nucleic acid to be transcribed and a promoter.

[0109] The terms “residue” or “amino acid residue” or “amino acid” are used interchangeably herein to refer to an amino acid that is incorporated into a protein, polypeptide or peptide (collectively “protein”). The amino acid may be a naturally occurring amino acid and, unless otherwise limited, may encompass known analogs of natural amino acids that can function in a similar manner as naturally occurring amino acids.

[0110] The term “selectively hybridizes” includes reference to hybridization, under stringent hybridization conditions, of a nucleic acid sequence to a specified nucleic acid target sequence to a detectably greater degree (e.g., at least 2-fold over background) than its hybridization to non-target nucleic acid sequences and to the substantial exclusion of non-target nucleic acids. Selectively hybridizing sequences typically have about at least 40% sequence identity, preferably 60-90% sequence identity and most preferably 100% sequence identity (i.e., complementary) with each other.

[0111] The terms “stringent conditions” or “stringent hybridization conditions” include reference to conditions under which a probe will hybridize to its target sequence, to a detectably greater degree than other sequences (e.g., at least 2-fold over background). Stringent conditions are sequence-dependent and will be different in different circumstances. By controlling the stringency of the hybridization and/or washing conditions, target sequences can be identified which can be up to 100% complementary to the probe (homologous probing). Alternatively, stringency conditions can be adjusted to allow some mismatching in sequences so that lower degrees of similarity are detected (heterologous probing). Optimally, the probe is approximately 500 nucleotides in length, but can vary greatly in length from less than 500 nucleotides to equal to the entire length of the target sequence.

[0112] Typically, stringent conditions will be those in which the salt concentration is less than about 1.5 M Na ion, typically about 0.01 to 1.0 M Na ion concentration (or other salts) at pH 7.0 to 8.3 and the temperature is at least about 30° C. for short probes (e.g., 10 to 50 nucleotides) and at least about 60° C. for long probes (e.g., greater than 50 nucleotides). Stringent conditions may also be achieved with the addition of destabilizing agents such as formamide or Denhardt's. Exemplary low stringency conditions include hybridization with a buffer solution of 30 to 35% formamide, 1 M NaCl, 1% SDS (sodium dodecyl sulphate) at 37° C. and a wash in 1× to 2×SSC (20×SSC=3.0 M NaCl/0.3 M trisodium citrate) at 50 to 55° C. Exemplary moderate stringency conditions include hybridization in 40 to 45% formamide, 1 M NaCl, 1% SDS at 37° C. and a wash in 0.5× to 1×SSC at 55 to 60° C. Exemplary high stringency conditions include hybridization in 50% formamide, 1 M NaCl, 1% SDS at 37° C. and a wash in 0.1×SSC at 60 to 65° C. Specificity is typically the function of post-hybridization washes, the critical factors being the ionic strength and temperature of the final wash solution. For DNA-DNA hybrids, the Tₘ can be approximated from the equation of Meinkoth and Wahl, (1984) Anal. Biochem. 138:267-84: Tₘ=81.5° C.+16.6 (log M)+0.41 (% GC)−0.61 (% form)−500/L; where M is the molarity of monovalent cations, % GC is the percentage of guanosine and cytosine nucleotides in the DNA, % form is the percentage of formamide in the hybridization solution, and L is the length of the hybrid in base pairs. The Tₘ is the temperature (under defined ionic strength and pH) at which 50% of a complementary target sequence hybridizes to a perfectly matched probe. Tₘ is reduced by about 1° C. for each 1% of mismatching; thus, Tₘ, hybridization and/or wash conditions can be adjusted to hybridize to sequences of the desired identity. For example, if sequences with ≧90% identity are sought, the Tₘ can be decreased 10° C. Generally, stringent conditions are selected to be about 5° C. lower than the thermal melting point (Tₘ) for the specific sequence and its complement at a defined ionic strength and pH. However, severely stringent conditions can utilize a hybridization and/or wash at 1, 2, 3 or 4° C. lower than the thermal melting point (Tₘ); moderately stringent conditions can utilize a hybridization and/or wash at 6, 7, 8, 9 or 10° C. lower than the thermal melting point (Tₘ); low stringency conditions can utilize a hybridization and/or wash at 11, 12, 13, 14, 15 or 20° C. lower than the thermal melting point (Tₘ). Using the equation, hybridization and wash compositions, and desired Tₘ, those of ordinary skill will understand that variations in the stringency of hybridization and/or wash solutions are inherently described. If the desired degree of mismatching results in a Tₘ of less than 45° C. (aqueous solution) or 32° C. (formamide solution) it is preferred to increase the SSC concentration so that a higher temperature can be used. An extensive guide to the hybridization of nucleic acids is found in Tijssen, LABORATORY TECHNIQUES IN BIOCHEMISTRY AND MOLECULAR BIOLOGY—HYBRIDIZATION WITH NUCLEIC ACID PROBES, part I, chapter 2, “Overview of principles of hybridization and the strategy of nucleic acid probe assays,” Elsevier, New York (1993) and CURRENT PROTOCOLS IN MOLECULAR BIOLOGY, chapter 2, Ausubel, et al., eds, Greene Publishing and Wiley-Interscience, New York (1995). Unless otherwise stated, in the present application high stringency is defined as hybridization in 4×SSC, 5×Denhardt's (5 g Ficoll, 5 g polyvinypyrrolidone, 5 g bovine serum albumin in 500 ml of water), 0.1 mg/ml boiled salmon sperm DNA and 25 mM Na phosphate at 65° C. and a wash in 0.1×SSC, 0.1% SDS at 65° C.

[0113] As used herein, “transgenic plant” includes reference to a plant, which comprises within its genome a heterologous polynucleotide. Generally, the heterologous polynucleotide is stably integrated within the genome such that the polynucleotide is passed on to successive generations. The heterologous polynucleotide may be integrated into the genome alone or as part of a recombinant expression cassette. “Transgenic” is used herein to include any cell, cell line, callus, tissue, plant part or plant, the genotype of which has been altered by the presence of heterologous nucleic acid including those transgenics initially so altered as well as those created by sexual crosses or asexual propagation from the initial transgenic. The term “transgenic” as used herein does not encompass the alteration of the genome (chromosomal or extra-chromosomal) by conventional plant breeding methods or by naturally occurring events such as random cross-fertilization, non-recombinant viral infection, non-recombinant bacterial transformation, non-recombinant transposition or spontaneous mutation.

[0114] As used herein, “vector” includes reference to a nucleic acid used in transfection of a host cell and into which can be inserted a polynucleotide. Vectors are often replicons. Expression vectors permit transcription of a nucleic acid inserted therein.

[0115] The following terms are used to describe the sequence relationships between two or more nucleic acids or polynucleotides or polypeptides: (a) “reference sequence,” (b) “comparison window,” (c) “sequence identity,” (d) “percentage of sequence identity” and (e) “substantial identity.”

[0116] As used herein, “reference sequence” is a defined sequence used as a basis for sequence comparison. A reference sequence may be a subset or the entirety of a specified sequence; for example, as a segment of a full-length cDNA or gene sequence or the complete cDNA or gene sequence.

[0117] As used herein, “comparison window” means includes reference to a contiguous and specified segment of a polynucleotide sequence, wherein the polynucleotide sequence may be compared to a reference sequence and wherein the portion of the polynucleotide sequence in the comparison window may comprise additions or deletions (i.e., gaps) compared to the reference sequence (which does not comprise additions or deletions) for optimal alignment of the two sequences. Generally, the comparison window is at least 20 contiguous nucleotides in length, and optionally can be 30, 40, 50, 100 or longer. Those of skill in the art understand that to avoid a high similarity to a reference sequence due to inclusion of gaps in the polynucleotide sequence a gap penalty is typically introduced and is subtracted from the number of matches.

[0118] Methods of alignment of nucleotide and amino acid sequences for comparison are well known in the art. The local homology algorithm (BESTFIT) of Smith and Waterman, (1981) Adv. Appl. Math 2:482, may conduct optimal alignment of sequences for comparison; by the homology alignment algorithm (GAP) of Needleman and Wunsch, (1970) J. Mol. Biol. 48:443-53; by the search for similarity method (Tfasta and Fasta) of Pearson and Lipman, (1988) Proc. Natl. Acad. Sci. USA 85:2444; by computerized implementations of these algorithms, including, but not limited to: CLUSTAL in the PC/Gene program by Intelligenetics, Mountain View, Calif., GAP, BESTFIT, BLAST, FASTA, and TFASTA in the Wisconsin Genetics Software Package®, Version 8 (available from Genetics Computer Group (GCG® programs (Accelrys, Inc., San Diego, Calif.)). The CLUSTAL program is well described by Higgins and Sharp, (1988) Gene 73:237-44; Higgins and Sharp, (1989) CABIOS 5:151-3; Corpet, et al., (1988) Nucleic Acids Res. 16:10881-90; Huang, et al., (1992) Computer Applications in the Biosciences 8:155-65, and Pearson, et al., (1994) Meth. Mol. Biol. 24:307-31. The preferred program to use for optimal global alignment of multiple sequences is PileUp (Feng and Doolittle, (1987) J. Mol. Evol., 25:351-60 which is similar to the method described by Higgins and Sharp, (1989) CABIOS 5:151-53 and hereby incorporated by reference). The BLAST family of programs which can be used for database similarity searches includes: BLASTN for nucleotide query sequences against nucleotide database sequences; BLASTX for nucleotide query sequences against protein database sequences; BLASTP for protein query sequences against protein database sequences; TBLASTN for protein query sequences against nucleotide database sequences and TBLASTX for nucleotide query sequences against nucleotide database sequences. See, CURRENT PROTOCOLS IN MOLECULAR BIOLOGY, Chapter 19, Ausubel, et al., eds., Greene Publishing and Wiley-Interscience, New York (1995).

[0119] GAP uses the algorithm of Needleman and Wunsch, supra, to find the alignment of two complete sequences that maximizes the number of matches and minimizes the number of gaps. GAP considers all possible alignments and gap positions and creates the alignment with the largest number of matched bases and the fewest gaps. It allows for the provision of a gap creation penalty and a gap extension penalty in units of matched bases. GAP must make a profit of gap creation penalty number of matches for each gap it inserts. If a gap extension penalty greater than zero is chosen, GAP must, in addition, make a profit for each gap inserted of the length of the gap times the gap extension penalty. Default gap creation penalty values and gap extension penalty values in Version 10 of the Wisconsin Genetics Software Package® are 8 and 2, respectively. The gap creation and gap extension penalties can be expressed as an integer selected from the group of integers consisting of from 0 to 100. Thus, for example, the gap creation and gap extension penalties can be 0, 1, 2, 3, 4, 5, 6, 7, 8, 9, 10, 15, 20, 30, 40, 50 or greater.

[0120] GAP presents one member of the family of best alignments. There may be many members of this family, but no other member has a better quality. GAP displays four figures of merit for alignments: Quality, Ratio, Identity and Similarity. The Quality is the metric maximized in order to align the sequences. Ratio is the quality divided by the number of bases in the shorter segment. Percent Identity is the percent of the symbols that actually match. Percent Similarity is the percent of the symbols that are similar. Symbols that are across from gaps are ignored. A similarity is scored when the scoring matrix value for a pair of symbols is greater than or equal to 0.50, the similarity threshold. The scoring matrix used in Version 10 of the Wisconsin Genetics Software Package® is BLOSUM62 (see, Henikoff and Henikoff, (1989) Proc. Natl. Acad. Sci. USA 89:10915).

[0121] Unless otherwise stated, sequence identity/similarity values provided herein refer to the value obtained using the BLAST 2.0 suite of programs using default parameters (Altschul, et al., (1997) Nucleic Acids Res. 25:3389-402).

[0122] As those of ordinary skill in the art will understand, BLAST searches assume that proteins can be modeled as random sequences. However, many real proteins comprise regions of nonrandom sequences, which may be homopolymeric tracts, short-period repeats, or regions enriched in one or more amino acids. Such low-complexity regions may be aligned between unrelated proteins even though other regions of the protein are entirely dissimilar. A number of low-complexity filter programs can be employed to reduce such low-complexity alignments. For example, the SEG (Wooten and Federhen, (1993) Comput. Chem. 17:149-63) and XNU (Claverie and States, (1993) Comput. Chem. 17:191-201) low-complexity filters can be employed alone or in combination.

[0123] As used herein, “sequence identity” or “identity” in the context of two nucleic acid or polypeptide sequences includes reference to the residues in the two sequences, which are the same when aligned for maximum correspondence over a specified comparison window. When percentage of sequence identity is used in reference to proteins it is recognized that residue positions which are not identical often differ by conservative amino acid substitutions, where amino acid residues are substituted for other amino acid residues with similar chemical properties (e.g., charge or hydrophobicity) and therefore do not change the functional properties of the molecule. Where sequences differ in conservative substitutions, the percent sequence identity may be adjusted upwards to correct for the conservative nature of the substitution. Sequences, which differ by such conservative substitutions, are said to have “sequence similarity” or “similarity.” Means for making this adjustment are well known to those of skill in the art. Typically this involves scoring a conservative substitution as a partial rather than a full mismatch, thereby increasing the percentage sequence identity. Thus, for example, where an identical amino acid is given a score of 1 and a non-conservative substitution is given a score of zero, a conservative substitution is given a score between zero and 1. The scoring of conservative substitutions is calculated, e.g., according to the algorithm of Meyers and Miller, (1988) Computer Applic. Biol. Sci. 4:11-17, e.g., as implemented in the program PC/GENE (Intelligenetics, Mountain View, Calif., USA).

[0124] As used herein, “percentage of sequence identity” means the value determined by comparing two optimally aligned sequences over a comparison window, wherein the portion of the polynucleotide sequence in the comparison window may comprise additions or deletions (i.e., gaps) as compared to the reference sequence (which does not comprise additions or deletions) for optimal alignment of the two sequences. The percentage is calculated by determining the number of positions at which the identical nucleic acid base or amino acid residue occurs in both sequences to yield the number of matched positions, dividing the number of matched positions by the total number of positions in the window of comparison and multiplying the result by 100 to yield the percentage of sequence identity.

[0125] The term “substantial identity” of polynucleotide sequences means that a polynucleotide comprises a sequence that has between 50-100% sequence identity, preferably at least 50% sequence identity, preferably at least 60% sequence identity, preferably at least 70%, more preferably at least 80%, more preferably at least 90% and most preferably at least 95%, compared to a reference sequence using one of the alignment programs described using standard parameters. One of skill will recognize that these values can be appropriately adjusted to determine corresponding identity of proteins encoded by two nucleotide sequences by taking into account codon degeneracy, amino acid similarity, reading frame positioning and the like. Substantial identity of amino acid sequences for these purposes normally means sequence identity of between 55-100%, preferably at least 55%, preferably at least 60%, more preferably at least 70%, 80%, 90% and most preferably at least 95%.

[0126] Another indication that nucleotide sequences are substantially identical is if two molecules hybridize to each other under stringent conditions. The degeneracy of the genetic code allows for many amino acids substitutions that lead to variety in the nucleotide sequence that code for the same amino acid, hence it is possible that the DNA sequence could code for the same polypeptide but not hybridize to each other under stringent conditions. This may occur, e.g., when a copy of a nucleic acid is created using the maximum codon degeneracy permitted by the genetic code. One indication that two nucleic acid sequences are substantially identical is that the polypeptide, which the first nucleic acid encodes, is immunologically cross reactive with the polypeptide encoded by the second nucleic acid.

[0127] The terms “substantial identity” in the context of a peptide indicates that a peptide comprises a sequence with between 55-100% sequence identity to a reference sequence preferably at least 55% sequence identity, preferably 60% preferably 70%, more preferably 80%, most preferably at least 90% or 95% sequence identity to the reference sequence over a specified comparison window. Preferably, optimal alignment is conducted using the homology alignment algorithm of Needleman and Wunsch, supra. An indication that two peptide sequences are substantially identical is that one peptide is immunologically reactive with antibodies raised against the second peptide. Thus, a peptide is substantially identical to a second peptide, for example, where the two peptides differ only by a conservative substitution. In addition, a peptide can be substantially identical to a second peptide when they differ by a non-conservative change if the epitope that the antibody recognizes is substantially identical. Peptides, which are “substantially similar” share sequences as, noted above except that residue positions, which are not identical, may differ by conservative amino acid changes.

[0128] The disclosure discloses diurnal polynucleotides and polypeptides. The novel nucleotides and proteins of the disclosure have an expression pattern which indicates that they regulate cell number and thus play an important role in plant development. The polynucleotides are expressed in various plant tissues. The polynucleotides and polypeptides thus provide an opportunity to manipulate plant development to alter seed and vegetative tissue development, timing or composition. This may be used to create a sterile plant, a seedless plant or a plant with altered endosperm composition.

[0129] Maize orthologs of the Arabidopsis and rice circadian genes were identified by reciprocal BLAST searches plus evaluation of whether the inferred proteins relationships abide by the speciation pattern, and then queried for oscillation patterns in leaf and ear tissues. Employing these criteria, maize homologues were identified for several major core components including CCA1/LHY, TOC1, PRR7/3, GI and ZTL (FIG. 1).

[0130] This study identified two TOC1 homologues, ZmTOCa and ZmTOCb, which mapped to chromosome 5 and 4, respectively. Transcription of both genes peaks at 6 μm, consistent with Arabidopsis TOC1 gene expression. TOC1 is a member of the pseudo-response regulator (PRR) family composed of evolutionarily conserved five PRR genes in Arabidopsis and rice (Murakami, et al., (2007) Biosci Biotechnol Biochem 71:1107-1110; Murakami, et al., (2003) Plant Cell Physiol 44:1229-1236). In addition to two ZmTOC1 homologues, the study also identified ZmPRR73, ZmPRR37 and ZmPRR59 that were named after rice PRR genes based on the level of sequence similarly (Murakami, et al., (2003)). Also identified were two ZEITLUPE homologues (Kim, et al., (2007) Nature 449:356-360), ZmZTLa and ZmZTLb, which mapped to chromosome 2 and 4. Two maize orthologs of GIGANTIA, gigz1A and gigz1B, were described previously (Miller, et al., (2008) Planta 227:1377-1388) and are here confirmed their oscillation in both ears and leaves. Cycling of the core components ZmCCA, ZmLHY, ZmTOC1a and ZmTOC1b were further confirmed via RT-PCR analysis (FIG. 2). The amplitudes of the core components is attenuated in the developing ear when compared with leaf tissue, but still robust. These data show that the majority of the plant core oscillator system is functioning in non-photosynthetic tissues such as ear, but the oscillator output is apparently largely isolated from the transcriptional machinery affecting downstream diurnal expression changes.

[0131] It was determined that diurnally regulated transcripts pervade most functions of the maize leaf cells. The 6674 transcripts (out of 10,037 Agilent array probes) that are here determined to be diurnally regulated represent over 22% of the total detected transcripts expressed and these 6674 transcripts could be assigned to 1716 different Gene Ontology (GO) terms and 22 KOGs functional categories.

[0132] Generally, individual genes peak have just one peak in their diurnal cycle. When these genes were assigned to functional terms and the relative enrichment of those functional terms was plotted across the span of the day, most functions had a marked enrichment for a time particular pattern in the day. There was also however a clear tendency for some functional terms to have a bimodal pattern, wherein there was a mid-morning peak at 10 AM and a secondary peak in the late afternoon or evening at 6 PM or 10 PM. Over 18% of the functional terms were classified as bimodal regulated, with further subdivisions made according to relative enrichment of the morning or afternoon peak. Together with the functions assigned as peaking at just one peak in the day, 94.5% of the 1738 functions were assigned to one of these patterns, with just 95 leftover to be assigned to the “Other” patterns.

[0133] Often the bimodal patterned functional terms represent broader gene-rich functional classifications such as protein kinase activity, signal transduction mechanism, or amino acid transport and metabolism. (FIG. 5) Accordingly, these bimodal patterns tend to also have fair representation across the day and not just at 10 AM and 6/10 PM. Nonetheless, it remains a chief feature of the diurnal pattern that gene and functional enrichment peaks typically occur in the mid-morning and again later in the afternoon/evening. In this experiment the sunrise was 6:02 AM and the sunset at 8:40 PM. The sunrise is thus 4 hours before the 10 AM functional peak, but the sunset is 2.45 hours after the 6 PM timepoint and 1.25 hours before the 10 PM timepoint. Additional timepoints may provide greater resolution, but that among the bimodal patterns the 10 AM>6/10 PM patterns have over 70% higher functional enrichment indexes than the 6 PM>10 AM patterns may relate to this asymmetrical placement of the timepoints relative to the sunrise and sunset. Alternatively, some functional classes may be inherently enriched for the morning phase, reflecting underlying biological tendencies.

[0134] That 1643 or 94.5% of the functional terms were assigned to one temporal peak pattern indicates a fairly defined progression of functions across the day. Functional groups are thus not uniformly spread across the different phases of the day, but instead exhibit distinct patterns and biases. The dawn enriched functional categories include for example: response to cold, lipid catabolism and hormone signaling. This follows by mid-morning with multiple hormone response functions becoming enriched. The mid-day becomes dominated expectedly by photosynthesis systems I and II, chlorophyll synthesis, and monodehydroascorbate reductase (MDAR) involved in antioxidant generation. Late afternoon and evening reveal a marked enrichment for ribosomal and DNA damage repair, including helicase, telomerase and endonuclease activity, suggesting chromosomal and ribosomal repair systems are activated. In addition sucrose transport and the pentose-phosphate shunt peak in late afternoon/evening suggesting dynamics of chloroplast carbohydrate metabolism. Late evening peaks include the red::far-red light phototransduction, noted in the introduction as regulating the core clock, but also hydrogen peroxide metabolism. At night caspase(-like) activity, often associated with cell death, photosystem II catabolism, nucleotide transport and metabolism and acyl-CoA binding functions all peak. Other irregular but interesting peak patterns are amino acid glycosylation cresting at both 6 PM and 2 AM, and both malic enzyme and calmodulin binding peaking at 10 AM and 2 AM. These are just a few examples of a very complex story addressing the whole plant cellular physiology.

[0135] Notably, despite the great variety of genes and functions being diurnally regulated, most functional categories have only a minority of members that are diurnally regulated. Among the 1738 functional categories, the mean coverage was 28.2% with the median 20% and mode about 15%. Functional categories containing multiple genes were not completely represented by diurnally regulated transcripts, and few functional categories were outstandingly enriched for diurnally regulated transcripts. GO:0004614 phosphoglucomutase activity had five of six and GO:0009926 auxin polar transport had three of four, transcripts among the diurnal set. These findings indicate that diurnally regulated transcripts are within but do not dominate these diverse functions.

[0136] A number of maize diurnally regulated genes were identified during the analyses. A total of 471 sequences, including those from immature ear, those having high amplitude/magnitude cycling in leaf tissue, and diverse sequences associated with NUE and Carbon::Nitrogen functions. The sequences contain ORFs, encoded polypeptides, and their associated promoters.

### Nucleic Acids

[0137] The present disclosure provides, inter alia, isolated nucleic acids of RNA, DNA and analogs and/or chimeras thereof, comprising a diurnal polynucleotide.

[0138] The present disclosure also includes polynucleotides optimized for expression in different organisms. For example, for expression of the polynucleotide in a maize plant, the sequence can be altered to account for specific codon preferences and to alter GC content as according to Murray, et al, supra. Maize codon usage for 28 genes from maize plants is listed in Table 4 of Murray, et al., supra.

[0139] The diurnal nucleic acids of the present disclosure comprise isolated diurnal polynucleotides which are inclusive of:
[0140] (a) a polynucleotide encoding a diurnal polypeptide and conservatively modified and polymorphic variants thereof;
[0141] (b) a polynucleotide having at least 70% sequence identity with polynucleotides of (a) or (b);
[0142] (c) complementary sequences of polynucleotides of (a) or (b).
   The following table, Table 1, lists the specific identities of the polynucleotides and polypeptides and disclosed herein.

TABLE 1

| | | Polynucleotide/ | |
|---|---|---|---|
| Name | Plant species | Polypeptide | SEQ ID NO: |
| ZmTOC1b | Zea mays | Polynucleotide | SEQ ID NO: 1 |
| ZmMYB.L | Zea mays | Polynucleotide | SEQ ID NO: 2 |
| ZmZTLa | Zea mays | Polynucleotide | SEQ ID NO: 3 |
| ZmZTLb | Zea mays | Polynucleotide | SEQ ID NO: 4 |
| ZmPRR37 | Zea mays | Polynucleotide | SEQ ID NO: 5 |
| ZmPRR59 | Zea mays | Polynucleotide | SEQ ID NO: 6 |
| ZmCO-like | Zea mays | Polynucleotide | SEQ ID NO: 7 |
| ZmCCA1 genomic | Zea mays | Polynucleotide | SEQ ID NO: 8 |
| ZmCCA1 Exon 1 | Zea mays | Polynucleotide | SEQ ID NO: 9 |
| ZmCCA1 Exon 2 | Zea mays | Polynucleotide | SEQ ID NO: 10 |
| ZmCCA1 Exon 3 | Zea mays | Polynucleotide | SEQ ID NO: 11 |
| ZmCCA1 Exon 4 | Zea mays | Polynucleotide | SEQ ID NO: 12 |
| ZmCCA1 Exon 5 | Zea mays | Polynucleotide | SEQ ID NO: 13 |
| ZmCCA1 Exon 6 | Zea mays | Polynucleotide | SEQ ID NO: 14 |
| ZmCCA1 Exon 7 | Zea mays | Polynucleotide | SEQ ID NO: 15 |
| ZmCCA1 Exon 8 | Zea mays | Polynucleotide | SEQ ID NO: 16 |
| ZmCCA1 Exon 9 | Zea mays | Polynucleotide | SEQ ID NO: 17 |
| ZmCCA1 Exon 10 | Zea mays | Polynucleotide | SEQ ID NO: 18 |
| ZmCCA1 Exon 11 | Zea mays | Polynucleotide | SEQ ID NO: 19 |
| ZmLHY genomic | Zea mays | Polynucleotide | SEQ ID NO: 20 |
| ZmLHY Exon 1 | Zea mays | Polynucleotide | SEQ ID NO: 21 |
| ZmLHY Exon 2 | Zea mays | Polynucleotide | SEQ ID NO: 22 |
| ZmLHY Exon 3 | Zea mays | Polynucleotide | SEQ ID NO: 23 |
| ZmLHY Exon 4 | Zea mays | Polynucleotide | SEQ ID NO: 24 |
| ZmLHY Exon 5 | Zea mays | Polynucleotide | SEQ ID NO: 25 |
| ZmLHY Exon 6 | Zea mays | Polynucleotide | SEQ ID NO: 26 |
| ZmLHY Exon 7 | Zea mays | Polynucleotide | SEQ ID NO: 27 |
| ZmLHY Exon 8 | Zea mays | Polynucleotide | SEQ ID NO: 28 |
| ZmLHY Exon 9 | Zea mays | Polynucleotide | SEQ ID NO: 29 |
| ZmLHY Exon 10 | Zea mays | Polynucleotide | SEQ ID NO: 30 |
| Diurnal Promoter #1 | Zea mays | Polynucleotide | SEQ ID NO: 31 |
| Diurnal Promoter #2 | Zea mays | Polynucleotide | SEQ ID NO: 32 |
| Diurnal Promoter #3 | Zea mays | Polynucleotide | SEQ ID NO: 33 |
| Dirunal promoter #4 | Zea mays | Polynucleotide | SEQ ID NO: 34 |
| ZmCCA1 promoter | Zea mays | Polynucleotide | SEQ ID NO: 35 |
| ZmLHY promoter | Zea mays | Polynucleotide | SEQ ID NO: 36 |
| Diurnal promoter#7 | Zea mays | Polynucleotide | SEQ ID NO: 37 |
| Diurnal Promoter #8 | Zea mays | Polynucleotide | SEQ ID NO: 38 |
| Diurnal Promoter #9 | Zea mays | Polynucleotide | SEQ ID NO: 39 |
| ZmTOCa Promoter | Zea mays | Polynucleotide | SEQ ID NO: 40 |
| Diurnal Ear Promoter 1 | Zea mays | Polynucleotide | SEQ ID NO: 41 |
| Diurnal Ear Promoter 2 | Zea mays | Polynucleotide | SEQ ID NO: 42 |
| Diurnal Ear Promoter 3 | Zea mays | Polynucleotide | SEQ ID NO: 43 |
| Diurnal Ear Promoter 4 | Zea mays | Polynucleotide | SEQ ID NO: 44 |
| Diurnal Ear Promoter 5 | Zea mays | Polynucleotide | SEQ ID NO: 45 |
| Diurnal Ear Promoter 7 | Zea mays | Polynucleotide | SEQ ID NO: 46 |
| Diurnal Ear Promoter 8 | Zea mays | Polynucleotide | SEQ ID NO: 47 |
| Diurnal Ear Promoter 9 | Zea mays | Polynucleotide | SEQ ID NO: 48 |
| Diurnal Ear Promoter 10 | Zea mays | Polynucleotide | SEQ ID NO: 49 |
| Diurnal Ear Promoter 11 | Zea mays | Polynucleotide | SEQ ID NO: 50 |
| Diurnal Ear Promoter 12 | Zea mays | Polynucleotide | SEQ ID NO: 51 |
| Diurnal Ear Promoter 13 | Zea mays | Polynucleotide | SEQ ID NO: 52 |
| Diurnal Ear Promoter 14 | Zea mays | Polynucleotide | SEQ ID NO: 53 |
| Diurnal Ear Promoter 15 | Zea mays | Polynucleotide | SEQ ID NO: 54 |
| Diurnal Ear Promoter 16 | Zea mays | Polynucleotide | SEQ ID NO: 55 |
| Diurnal NUE Promoter 1 | Zea mays | Polynucleotide | SEQ ID NO: 56 |
| Diurnal NUE Promoter 2 | Zea mays | Polynucleotide | SEQ ID NO: 57 |
| Diurnal NUE Promoter 3 | Zea mays | Polynucleotide | SEQ ID NO: 58 |
| Diurnal NUE Promoter 4 | Zea mays | Polynucleotide | SEQ ID NO: 59 |
| Diurnal NUE Promoter 5 | Zea mays | Polynucleotide | SEQ ID NO: 60 |
| Diurnal NUE Promoter 6 | Zea mays | Polynucleotide | SEQ ID NO: 61 |
| Diurnal NUE Promoter 7 | Zea mays | Polynucleotide | SEQ ID NO: 62 |
| Diurnal NUE Promoter 8 | Zea mays | Polynucleotide | SEQ ID NO: 63 |
| Diurnal NUE Promoter 9 | Zea mays | Polynucleotide | SEQ ID NO: 64 |
| Diurnal NUE Promoter 10 | Zea mays | Polynucleotide | SEQ ID NO: 65 |
| Diurnal NUE Promoter 11 | Zea mays | Polynucleotide | SEQ ID NO: 66 |
| Diurnal NUE Promoter 12 | Zea mays | Polynucleotide | SEQ ID NO: 67 |
| Diurnal NUE Promoter 13 | Zea mays | Polynucleotide | SEQ ID NO: 68 |
| Diurnal NUE Promoter 14 | Zea mays | Polynucleotide | SEQ ID NO: 69 |
| Diurnal NUE Promoter 15 | Zea mays | Polynucleotide | SEQ ID NO: 70 |
| Diurnal NUE Promoter 16 | Zea mays | Polynucleotide | SEQ ID NO: 71 |
| Diurnal NUE Promoter 17 | Zea mays | Polynucleotide | SEQ ID NO: 72 |
| Diurnal NUE Promoter 18 | Zea mays | Polynucleotide | SEQ ID NO: 73 |
| Diurnal NUE Promoter 19 | Zea mays | Polynucleotide | SEQ ID NO: 74 |
| Diurnal NUE Promoter 20 | Zea mays | Polynucleotide | SEQ ID NO: 75 |
| Diurnal NUE Promoter 21 | Zea mays | Polynucleotide | SEQ ID NO: 76 |
| Diurnal NUE Promoter 22 | Zea mays | Polynucleotide | SEQ ID NO: 77 |
| Diurnal NUE Promoter 23 | Zea mays | Polynucleotide | SEQ ID NO: 78 |
| Diurnal NUE Promoter 24 | Zea mays | Polynucleotide | SEQ ID NO: 79 |
| Diurnal NUE Promoter 25 | Zea mays | Polynucleotide | SEQ ID NO: 80 |
| Diurnal NUE Promoter 26 | Zea mays | Polynucleotide | SEQ ID NO: 81 |
| Diurnal NUE Promoter 27 | Zea mays | Polynucleotide | SEQ ID NO: 82 |
| Diurnal NUE Promoter 28 | Zea mays | Polynucleotide | SEQ ID NO: 83 |
| Diurnal NUE Promoter 29 | Zea mays | Polynucleotide | SEQ ID NO: 84 |
| Diurnal NUE Promoter 30 | Zea mays | Polynucleotide | SEQ ID NO: 85 |
| Diurnal NUE Promoter 31 | Zea mays | Polynucleotide | SEQ ID NO: 86 |
| Diurnal NUE Promoter 32 | Zea mays | Polynucleotide | SEQ ID NO: 87 |
| Diurnal NUE Promoter 33 | Zea mays | Polynucleotide | SEQ ID NO: 88 |
| Diurnal NUE Promoter 34 | Zea mays | Polynucleotide | SEQ ID NO: 89 |
| Diurnal NUE Promoter 35 | Zea mays | Polynucleotide | SEQ ID NO: 90 |
| Diurnal NUE Promoter 36 | Zea mays | Polynucleotide | SEQ ID NO: 91 |
| Diurnal NUE Promoter 37 | Zea mays | Polynucleotide | SEQ ID NO: 92 |
| Diurnal NUE Promoter 38 | Zea mays | Polynucleotide | SEQ ID NO: 93 |
| Diurnal NUE Promoter 39 | Zea mays | Polynucleotide | SEQ ID NO: 94 |
| Diurnal NUE Promoter 40 | Zea mays | Polynucleotide | SEQ ID NO: 95 |
| Diurnal NUE Promoter 41 | Zea mays | Polynucleotide | SEQ ID NO: 96 |
| Diurnal NUE Promoter 42 | Zea mays | Polynucleotide | SEQ ID NO: 97 |
| Diurnal NUE Promoter 43 | Zea mays | Polynucleotide | SEQ ID NO: 98 |
| Diurnal NUE Promoter 44 | Zea mays | Polynucleotide | SEQ ID NO: 99 |
| Diurnal NUE Promoter 45 | Zea mays | Polynucleotide | SEQ ID NO: 100 |
| Diurnal NUE Promoter 46 | Zea mays | Polynucleotide | SEQ ID NO: 101 |
| Diurnal NUE Promoter 47 | Zea mays | Polynucleotide | SEQ ID NO: 102 |
| Diurnal NUE Promoter 48 | Zea mays | Polynucleotide | SEQ ID NO: 103 |
| Diurnal NUE Promoter 49 | Zea mays | Polynucleotide | SEQ ID NO: 104 |
| Diurnal NUE Promoter 50 | Zea mays | Polynucleotide | SEQ ID NO: 105 |
| Diurnal NUE Promoter 51 | Zea mays | Polynucleotide | SEQ ID NO: 106 |
| Diurnal NUE Promoter 52 | Zea mays | Polynucleotide | SEQ ID NO: 107 |
| Diurnal NUE Promoter 53 | Zea mays | Polynucleotide | SEQ ID NO: 108 |
| Diurnal NUE Promoter 54 | Zea mays | Polynucleotide | SEQ ID NO: 109 |
| Diurnal NUE Promoter 55 | Zea mays | Polynucleotide | SEQ ID NO: 110 |
| Diurnal NUE Promoter 56 | Zea mays | Polynucleotide | SEQ ID NO: 111 |
| Diurnal NUE Promoter 57 | Zea mays | Polynucleotide | SEQ ID NO: 112 |
| Diurnal NUE Promoter 58 | Zea mays | Polynucleotide | SEQ ID NO: 113 |
| Diurnal NUE Promoter 59 | Zea mays | Polynucleotide | SEQ ID NO: 114 |
| Diurnal NUE Promoter 60 | Zea mays | Polynucleotide | SEQ ID NO: 115 |
| Diurnal NUE Promoter 61 | Zea mays | Polynucleotide | SEQ ID NO: 116 |
| Diurnal AMP Promoter 1 | Zea mays | Polynucleotide | SEQ ID NO: 117 |
| Diurnal AMP Promoter 2 | Zea mays | Polynucleotide | SEQ ID NO: 118 |
| Diurnal AMP Promoter 3 | Zea mays | Polynucleotide | SEQ ID NO: 119 |
| Diurnal AMP Promoter 4 | Zea mays | Polynucleotide | SEQ ID NO: 120 |
| Diurnal AMP Promoter 5 | Zea mays | Polynucleotide | SEQ ID NO: 121 |
| Diurnal AMP Promoter 6 | Zea mays | Polynucleotide | SEQ ID NO: 122 |
| Diurnal AMP Promoter 7 | Zea mays | Polynucleotide | SEQ ID NO: 123 |
| Diurnal AMP Promoter 8 | Zea mays | Polynucleotide | SEQ ID NO: 124 |
| Diurnal AMP Promoter 9 | Zea mays | Polynucleotide | SEQ ID NO: 125 |
| Diurnal AMP Promoter 10 | Zea mays | Polynucleotide | SEQ ID NO: 126 |
| Diurnal AMP Promoter 11 | Zea mays | Polynucleotide | SEQ ID NO: 127 |
| Diurnal AMP Promoter 12 | Zea mays | Polynucleotide | SEQ ID NO: 128 |
| Diurnal AMP Promoter 13 | Zea mays | Polynucleotide | SEQ ID NO: 129 |
| Diurnal AMP Promoter 14 | Zea mays | Polynucleotide | SEQ ID NO: 130 |
| Diurnal AMP Promoter 15 | Zea mays | Polynucleotide | SEQ ID NO: 131 |
| Diurnal AMP Promoter 16 | Zea mays | Polynucleotide | SEQ ID NO: 132 |
| Diurnal AMP Promoter 17 | Zea mays | Polynucleotide | SEQ ID NO: 133 |
| Diurnal AMP Promoter 18 | Zea mays | Polynucleotide | SEQ ID NO: 134 |
| Diurnal AMP Promoter 19 | Zea mays | Polynucleotide | SEQ ID NO: 135 |
| Diurnal AMP Promoter 20 | Zea mays | Polynucleotide | SEQ ID NO: 136 |
| Diurnal AMP Promoter 21 | Zea mays | Polynucleotide | SEQ ID NO: 137 |
| Diurnal AMP Promoter 22 | Zea mays | Polynucleotide | SEQ ID NO: 138 |
| Diurnal AMP Promoter 23 | Zea mays | Polynucleotide | SEQ ID NO: 139 |
| Diurnal AMP Promoter 24 | Zea mays | Polynucleotide | SEQ ID NO: 140 |
| Diurnal AMP Promoter 25 | Zea mays | Polynucleotide | SEQ ID NO: 141 |
| Diurnal AMP Promoter 26 | Zea mays | Polynucleotide | SEQ ID NO: 142 |
| Diurnal AMP Promoter 27 | Zea mays | Polynucleotide | SEQ ID NO: 143 |
| Diurnal AMP Promoter 28 | Zea mays | Polynucleotide | SEQ ID NO: 144 |
| Diurnal AMP Promoter 29 | Zea mays | Polynucleotide | SEQ ID NO: 145 |
| Diurnal AMP Promoter 30 | Zea mays | Polynucleotide | SEQ ID NO: 146 |
| Diurnal AMP Promoter 31 | Zea mays | Polynucleotide | SEQ ID NO: 147 |
| Diurnal AMP Promoter 32 | Zea mays | Polynucleotide | SEQ ID NO: 148 |
| Diurnal AMP Promoter 33 | Zea mays | Polynucleotide | SEQ ID NO: 149 |
| Diurnal AMP Promoter 34 | Zea mays | Polynucleotide | SEQ ID NO: 150 |
| Diurnal AMP Promoter 35 | Zea mays | Polynucleotide | SEQ ID NO: 151 |
| Diurnal AMP Promoter 36 | Zea mays | Polynucleotide | SEQ ID NO: 152 |
| Diurnal AMP Promoter 37 | Zea mays | Polynucleotide | SEQ ID NO: 153 |
| Diurnal AMP Promoter 38 | Zea mays | Polynucleotide | SEQ ID NO: 154 |
| Diurnal AMP Promoter 39 | Zea mays | Polynucleotide | SEQ ID NO: 155 |
| Diurnal AMP Promoter 40 | Zea mays | Polynucleotide | SEQ ID NO: 156 |
| Diurnal AMP Promoter 41 | Zea mays | Polynucleotide | SEQ ID NO: 157 |
| Diurnal AMP Promoter 42 | Zea mays | Polynucleotide | SEQ ID NO: 158 |
| Diurnal AMP Promoter 43 | Zea mays | Polynucleotide | SEQ ID NO: 159 |
| Diurnal AMP Promoter 44 | Zea mays | Polynucleotide | SEQ ID NO: 160 |
| Diurnal AMP Promoter 45 | Zea mays | Polynucleotide | SEQ ID NO: 161 |
| Diurnal AMP Promoter 46 | Zea mays | Polynucleotide | SEQ ID NO: 162 |
| Diurnal AMP Promoter 47 | Zea mays | Polynucleotide | SEQ ID NO: 163 |
| Diurnal AMP Promoter 48 | Zea mays | Polynucleotide | SEQ ID NO: 164 |
| Diurnal AMP Promoter 49 | Zea mays | Polynucleotide | SEQ ID NO: 165 |
| Diurnal AMP Promoter 50 | Zea mays | Polynucleotide | SEQ ID NO: 166 |
| Diurnal AMP Promoter 51 | Zea mays | Polynucleotide | SEQ ID NO: 167 |
| Diurnal AMP Promoter 52 | Zea mays | Polynucleotide | SEQ ID NO: 168 |
| Diurnal AMP Promoter 53 | Zea mays | Polynucleotide | SEQ ID NO: 169 |
| Diurnal AMP Promoter 54 | Zea mays | Polynucleotide | SEQ ID NO: 170 |
| Diurnal AMP Promoter 55 | Zea mays | Polynucleotide | SEQ ID NO: 171 |
| Diurnal AMP Promoter 56 | Zea mays | Polynucleotide | SEQ ID NO: 172 |
| Diurnal AMP Promoter 57 | Zea mays | Polynucleotide | SEQ ID NO: 173 |
| Diurnal AMP Promoter 58 | Zea mays | Polynucleotide | SEQ ID NO: 174 |
| Diurnal AMP Promoter 59 | Zea mays | Polynucleotide | SEQ ID NO: 175 |
| Diurnal AMP Promoter 60 | Zea mays | Polynucleotide | SEQ ID NO: 176 |
| Diurnal AMP Promoter 61 | Zea mays | Polynucleotide | SEQ ID NO: 177 |
| Diurnal AMP Promoter 62 | Zea mays | Polynucleotide | SEQ ID NO: 178 |
| Diurnal AMP Promoter 63 | Zea mays | Polynucleotide | SEQ ID NO: 179 |
| Diurnal AMP Promoter 64 | Zea mays | Polynucleotide | SEQ ID NO: 180 |
| Diurnal AMP Promoter 65 | Zea mays | Polynucleotide | SEQ ID NO: 181 |
| Diurnal AMP Promoter 66 | Zea mays | Polynucleotide | SEQ ID NO: 182 |
| Diurnal AMP Promoter 67 | Zea mays | Polynucleotide | SEQ ID NO: 183 |
| Diurnal Ear 1 | Zea mays | Polynucleotide | SEQ ID NO: 184 |
| Diurnal Ear 1 | Zea mays | Polypeptide | SEQ ID NO: 185 |
| Diurnal Ear 2 | Zea mays | Polynucleotide | SEQ ID NO: 186 |
| Diurnal Ear 2 | Zea mays | Polypeptide | SEQ ID NO: 187 |
| Diurnal Ear 3 | Zea mays | Polynucleotide | SEQ ID NO: 188 |
| Diurnal Ear 3 | Zea mays | Polypeptide | SEQ ID NO: 189 |
| Diurnal Ear 4 | Zea mays | Polynucleotide | SEQ ID NO: 190 |
| Diurnal Ear 4 | Zea mays | Polypeptide | SEQ ID NO: 191 |
| Diurnal Ear 5 | Zea mays | Polynucleotide | SEQ ID NO: 192 |
| Diurnal Ear 5 | Zea mays | Polypeptide | SEQ ID NO: 193 |
| Diurnal Ear 6 | Zea mays | Polynucleotide | SEQ ID NO: 194 |
| Diurnal Ear 6 | Zea mays | Polypeptide | SEQ ID NO: 195 |
| Diurnal Ear 7 | Zea mays | Polynucleotide | SEQ ID NO: 196 |
| Diurnal Ear 7 | Zea mays | Polypeptide | SEQ ID NO: 197 |
| Diurnal Ear 8 | Zea mays | Polynucleotide | SEQ ID NO: 198 |
| Diurnal Ear 8 | Zea mays | Polypeptide | SEQ ID NO: 199 |
| Diurnal Ear 9 | Zea mays | Polynucleotide | SEQ ID NO: 200 |
| Diurnal Ear 9 | Zea mays | Polypeptide | SEQ ID NO: 201 |
| Diurnal Ear 10 | Zea mays | Polynucleotide | SEQ ID NO: 202 |
| Diurnal Ear 10 | Zea mays | Polypeptide | SEQ ID NO: 203 |
| Diurnal Ear 11 | Zea mays | Polynucleotide | SEQ ID NO: 204 |
| Diurnal Ear 11 | Zea mays | Polypeptide | SEQ ID NO: 205 |
| Diurnal Ear 12 | Zea mays | Polynucleotide | SEQ ID NO: 206 |
| Diurnal Ear 12 | Zea mays | Polypeptide | SEQ ID NO: 207 |
| Diurnal Ear 13 | Zea mays | Polynucleotide | SEQ ID NO: 208 |
| Diurnal Ear 13 | Zea mays | Polypeptide | SEQ ID NO: 209 |
| Diurnal Ear 14 | Zea mays | Polynucleotide | SEQ ID NO: 210 |
| Diurnal Ear 14 | Zea mays | Polypeptide | SEQ ID NO: 211 |
| Diurnal Ear 15 | Zea mays | Polynucleotide | SEQ ID NO: 212 |
| Diurnal Ear 15 | Zea mays | Polypeptide | SEQ ID NO: 213 |
| Diurnal Ear 16 | Zea mays | Polynucleotide | SEQ ID NO: 214 |
| Diurnal Ear 16 | Zea mays | Polypeptide | SEQ ID NO: 215 |
| Diurnal NUE 1 | Zea mays | Polynucleotide | SEQ ID NO: 216 |
| Diurnal NUE 1 | Zea mays | Polypeptide | SEQ ID NO: 217 |
| Diurnal NUE 2 | Zea mays | Polynucleotide | SEQ ID NO: 218 |
| Diurnal NUE 2 | Zea mays | Polypeptide | SEQ ID NO: 219 |
| Diurnal NUE 3 | Zea mays | Polynucleotide | SEQ ID NO: 220 |
| Diurnal NUE 3 | Zea mays | Polypeptide | SEQ ID NO: 221 |
| Diurnal NUE 4 | Zea mays | Polynucleotide | SEQ ID NO: 222 |
| Diurnal NUE 4 | Zea mays | Polypeptide | SEQ ID NO: 223 |
| Diurnal NUE 5 | Zea mays | Polynucleotide | SEQ ID NO: 224 |
| Diurnal NUE 5 | Zea mays | Polypeptide | SEQ ID NO: 225 |
| Diurnal NUE 6 | Zea mays | Polynucleotide | SEQ ID NO: 226 |
| Diurnal NUE 6 | Zea mays | Polypeptide | SEQ ID NO: 227 |
| Diurnal NUE 7 | Zea mays | Polynucleotide | SEQ ID NO: 228 |
| Diurnal NUE 7 | Zea mays | Polypeptide | SEQ ID NO: 229 |
| Diurnal NUE 8 | Zea mays | Polynucleotide | SEQ ID NO: 230 |
| Diurnal NUE 8 | Zea mays | Polypeptide | SEQ ID NO: 231 |
| Diurnal NUE 9 | Zea mays | Polynucleotide | SEQ ID NO: 232 |
| Diurnal NUE 9 | Zea mays | Polypeptide | SEQ ID NO: 233 |
| Diurnal NUE 10 | Zea mays | Polynucleotide | SEQ ID NO: 234 |
| Diurnal NUE 10 | Zea mays | Polypeptide | SEQ ID NO: 235 |
| Diurnal NUE 11 | Zea mays | Polynucleotide | SEQ ID NO: 236 |
| Diurnal NUE 11 | Zea mays | Polypeptide | SEQ ID NO: 237 |
| Diurnal NUE 12 | Zea mays | Polynucleotide | SEQ ID NO: 238 |
| Diurnal NUE 12 | Zea mays | Polypeptide | SEQ ID NO: 239 |
| Diurnal NUE 13 | Zea mays | Polynucleotide | SEQ ID NO: 240 |
| Diurnal NUE 13 | Zea mays | Polypeptide | SEQ ID NO: 241 |
| Diurnal NUE 14 | Zea mays | Polynucleotide | SEQ ID NO: 242 |
| Diurnal NUE 14 | Zea mays | Polypeptide | SEQ ID NO: 243 |
| Diurnal NUE 15 | Zea mays | Polynucleotide | SEQ ID NO: 244 |
| Diurnal NUE 15 | Zea mays | Polypeptide | SEQ ID NO: 245 |
| Diurnal NUE 16 | Zea mays | Polynucleotide | SEQ ID NO: 246 |
| Diurnal NUE 16 | Zea mays | Polypeptide | SEQ ID NO: 247 |
| Diurnal NUE 17 | Zea mays | Polynucleotide | SEQ ID NO: 248 |
| Diurnal NUE 17 | Zea mays | Polypeptide | SEQ ID NO: 249 |
| Diurnal NUE 18 | Zea mays | Polynucleotide | SEQ ID NO: 250 |
| Diurnal NUE 18 | Zea mays | Polypeptide | SEQ ID NO: 251 |
| Diurnal NUE 19 | Zea mays | Polynucleotide | SEQ ID NO: 252 |
| Diurnal NUE 19 | Zea mays | Polypeptide | SEQ ID NO: 253 |
| Diurnal NUE 20 | Zea mays | Polynucleotide | SEQ ID NO: 254 |
| Diurnal NUE 20 | Zea mays | Polypeptide | SEQ ID NO: 255 |
| Diurnal NUE 21 | Zea mays | Polynucleotide | SEQ ID NO: 256 |
| Diurnal NUE 21 | Zea mays | Polypeptide | SEQ ID NO: 257 |
| Diurnal NUE 22 | Zea mays | Polynucleotide | SEQ ID NO: 258 |
| Diurnal NUE 22 | Zea mays | Polypeptide | SEQ ID NO: 259 |
| Diurnal NUE 23 | Zea mays | Polynucleotide | SEQ ID NO: 260 |
| Diurnal NUE 23 | Zea mays | Polypeptide | SEQ ID NO: 261 |
| Diurnal NUE 24 | Zea mays | Polynucleotide | SEQ ID NO: 262 |
| Diurnal NUE 24 | Zea mays | Polypeptide | SEQ ID NO: 263 |
| Diurnal NUE 25 | Zea mays | Polynucleotide | SEQ ID NO: 264 |
| Diurnal NUE 25 | Zea mays | Polypeptide | SEQ ID NO: 265 |
| Diurnal NUE 26 | Zea mays | Polynucleotide | SEQ ID NO: 266 |
| Diurnal NUE 26 | Zea mays | Polypeptide | SEQ ID NO: 267 |
| Diurnal NUE 27 | Zea mays | Polynucleotide | SEQ ID NO: 268 |
| Diurnal NUE 27 | Zea mays | Polypeptide | SEQ ID NO: 269 |
| Diurnal NUE 28 | Zea mays | Polynucleotide | SEQ ID NO: 270 |
| Diurnal NUE 28 | Zea mays | Polypeptide | SEQ ID NO: 271 |
| Diurnal NUE 29 | Zea mays | Polynucleotide | SEQ ID NO: 272 |
| Diurnal NUE 29 | Zea mays | Polypeptide | SEQ ID NO: 273 |
| Diurnal NUE 30 | Zea mays | Polynucleotide | SEQ ID NO: 274 |
| Diurnal NUE 30 | Zea mays | Polypeptide | SEQ ID NO: 275 |
| Diurnal NUE 31 | Zea mays | Polynucleotide | SEQ ID NO: 276 |
| Diurnal NUE 31 | Zea mays | Polypeptide | SEQ ID NO: 277 |
| Diurnal NUE 32 | Zea mays | Polynucleotide | SEQ ID NO: 278 |
| Diurnal NUE 32 | Zea mays | Polypeptide | SEQ ID NO: 279 |
| Diurnal NUE 33 | Zea mays | Polynucleotide | SEQ ID NO: 280 |
| Diurnal NUE 33 | Zea mays | Polypeptide | SEQ ID NO: 281 |
| Diurnal NUE 34 | Zea mays | Polynucleotide | SEQ ID NO: 282 |
| Diurnal NUE 34 | Zea mays | Polypeptide | SEQ ID NO: 283 |
| Diurnal NUE 35 | Zea mays | Polynucleotide | SEQ ID NO: 284 |
| Diurnal NUE 35 | Zea mays | Polypeptide | SEQ ID NO: 285 |
| Diurnal NUE 36 | Zea mays | Polynucleotide | SEQ ID NO: 286 |
| Diurnal NUE 36 | Zea mays | Polypeptide | SEQ ID NO: 287 |
| Diurnal NUE 37 | Zea mays | Polynucleotide | SEQ ID NO: 288 |
| Diurnal NUE 37 | Zea mays | Polypeptide | SEQ ID NO: 289 |
| Diurnal NUE 38 | Zea mays | Polynucleotide | SEQ ID NO: 290 |
| Diurnal NUE 38 | Zea mays | Polypeptide | SEQ ID NO: 291 |
| Diurnal NUE 39 | Zea mays | Polynucleotide | SEQ ID NO: 292 |
| Diurnal NUE 39 | Zea mays | Polypeptide | SEQ ID NO: 293 |
| Diurnal NUE 40 | Zea mays | Polynucleotide | SEQ ID NO: 294 |
| Diurnal NUE 40 | Zea mays | Polypeptide | SEQ ID NO: 295 |
| Diurnal NUE 41 | Zea mays | Polynucleotide | SEQ ID NO: 296 |
| Diurnal NUE 41 | Zea mays | Polypeptide | SEQ ID NO: 297 |
| Diurnal NUE 42 | Zea mays | Polynucleotide | SEQ ID NO: 298 |
| Diurnal NUE 42 | Zea mays | Polypeptide | SEQ ID NO: 299 |
| Diurnal NUE 43 | Zea mays | Polynucleotide | SEQ ID NO: 300 |
| Diurnal NUE 43 | Zea mays | Polypeptide | SEQ ID NO: 301 |
| Diurnal NUE 44 | Zea mays | Polynucleotide | SEQ ID NO: 302 |
| Diurnal NUE 44 | Zea mays | Polypeptide | SEQ ID NO: 303 |
| Diurnal NUE 45 | Zea mays | Polynucleotide | SEQ ID NO: 304 |
| Diurnal NUE 45 | Zea mays | Polypeptide | SEQ ID NO: 305 |
| Diurnal NUE 46 | Zea mays | Polynucleotide | SEQ ID NO: 306 |
| Diurnal NUE 46 | Zea mays | Polypeptide | SEQ ID NO: 307 |
| Diurnal NUE 47 | Zea mays | Polynucleotide | SEQ ID NO: 308 |
| Diurnal NUE 47 | Zea mays | Polypeptide | SEQ ID NO: 309 |
| Diurnal NUE 48 | Zea mays | Polynucleotide | SEQ ID NO: 310 |
| Diurnal NUE 48 | Zea mays | Polypeptide | SEQ ID NO: 311 |
| Diurnal NUE 49 | Zea mays | Polynucleotide | SEQ ID NO: 312 |
| Diurnal NUE 49 | Zea mays | Polypeptide | SEQ ID NO: 313 |
| Diurnal NUE 50 | Zea mays | Polynucleotide | SEQ ID NO: 314 |
| Diurnal NUE 50 | Zea mays | Polypeptide | SEQ ID NO: 315 |
| Diurnal NUE 51 | Zea mays | Polynucleotide | SEQ ID NO: 316 |
| Diurnal NUE 51 | Zea mays | Polypeptide | SEQ ID NO: 317 |
| Diurnal NUE 52 | Zea mays | Polynucleotide | SEQ ID NO: 318 |
| Diurnal NUE 52 | Zea mays | Polypeptide | SEQ ID NO: 319 |
| Diurnal NUE 53 | Zea mays | Polynucleotide | SEQ ID NO: 320 |
| Diurnal NUE 53 | Zea mays | Polypeptide | SEQ ID NO: 321 |
| Diurnal NUE 54 | Zea mays | Polynucleotide | SEQ ID NO: 322 |
| Diurnal NUE 54 | Zea mays | Polypeptide | SEQ ID NO: 323 |
| Diurnal NUE 55 | Zea mays | Polynucleotide | SEQ ID NO: 324 |
| Diurnal NUE 55 | Zea mays | Polypeptide | SEQ ID NO: 325 |
| Diurnal NUE 56 | Zea mays | Polynucleotide | SEQ ID NO: 326 |
| Diurnal NUE 56 | Zea mays | Polypeptide | SEQ ID NO: 327 |
| Diurnal NUE 57 | Zea mays | Polynucleotide | SEQ ID NO: 328 |
| Diurnal NUE 57 | Zea mays | Polypeptide | SEQ ID NO: 329 |
| Diurnal NUE 58 | Zea mays | Polynucleotide | SEQ ID NO: 330 |
| Diurnal NUE 58 | Zea mays | Polypeptide | SEQ ID NO: 331 |
| Diurnal NUE 59 | Zea mays | Polynucleotide | SEQ ID NO: 332 |
| Diurnal NUE 59 | Zea mays | Polypeptide | SEQ ID NO: 333 |
| Diurnal NUE 60 | Zea mays | Polynucleotide | SEQ ID NO: 334 |
| Diurnal NUE 60 | Zea mays | Polypeptide | SEQ ID NO: 335 |
| Diurnal NUE 61 | Zea mays | Polynucleotide | SEQ ID NO: 336 |
| Diurnal NUE 61 | Zea mays | Polypeptide | SEQ ID NO: 337 |
| Diurnal AMP 1 | Zea mays | Polynucleotide | SEQ ID NO: 338 |
| Diurnal AMP 1 | Zea mays | Polypeptide | SEQ ID NO: 339 |
| Diurnal AMP 2 | Zea mays | Polynucleotide | SEQ ID NO: 340 |
| Diurnal AMP 2 | Zea mays | Polypeptide | SEQ ID NO: 341 |
| Diurnal AMP 3 | Zea mays | Polynucleotide | SEQ ID NO: 342 |
| Diurnal AMP 3 | Zea mays | Polypeptide | SEQ ID NO: 343 |
| Diurnal AMP 4 | Zea mays | Polynucleotide | SEQ ID NO: 344 |
| Diurnal AMP 4 | Zea mays | Polypeptide | SEQ ID NO: 345 |
| Diurnal AMP 5 | Zea mays | Polynucleotide | SEQ ID NO: 346 |
| Diurnal AMP 5 | Zea mays | Polypeptide | SEQ ID NO: 347 |
| Diurnal AMP 6 | Zea mays | Polynucleotide | SEQ ID NO: 348 |
| Diurnal AMP 6 | Zea mays | Polypeptide | SEQ ID NO: 349 |
| Diurnal AMP 7 | Zea mays | Polynucleotide | SEQ ID NO: 350 |
| Diurnal AMP 7 | Zea mays | Polypeptide | SEQ ID NO: 351 |
| Diurnal AMP 8 | Zea mays | Polynucleotide | SEQ ID NO: 352 |
| Diurnal AMP 8 | Zea mays | Polypeptide | SEQ ID NO: 353 |
| Diurnal AMP 9 | Zea mays | Polynucleotide | SEQ ID NO: 354 |
| Diurnal AMP 9 | Zea mays | Polypeptide | SEQ ID NO: 355 |
| Diurnal AMP 10 | Zea mays | Polynucleotide | SEQ ID NO: 356 |
| Diurnal AMP 10 | Zea mays | Polypeptide | SEQ ID NO: 357 |
| Diurnal AMP 11 | Zea mays | Polynucleotide | SEQ ID NO: 358 |
| Diurnal AMP 11 | Zea mays | Polypeptide | SEQ ID NO: 359 |
| Diurnal AMP 12 | Zea mays | Polynucleotide | SEQ ID NO: 360 |
| Diurnal AMP 12 | Zea mays | Polypeptide | SEQ ID NO: 361 |
| Diurnal AMP 13 | Zea mays | Polynucleotide | SEQ ID NO: 362 |
| Diurnal AMP 13 | Zea mays | Polypeptide | SEQ ID NO: 363 |
| Diurnal AMP 14 | Zea mays | Polynucleotide | SEQ ID NO: 364 |
| Diurnal AMP 14 | Zea mays | Polypeptide | SEQ ID NO: 365 |
| Diurnal AMP 15 | Zea mays | Polynucleotide | SEQ ID NO: 366 |
| Diurnal AMP 15 | Zea mays | Polypeptide | SEQ ID NO: 367 |
| Diurnal AMP 16 | Zea mays | Polynucleotide | SEQ ID NO: 368 |
| Diurnal AMP 16 | Zea mays | Polypeptide | SEQ ID NO: 369 |
| Diurnal AMP 17 | Zea mays | Polynucleotide | SEQ ID NO: 370 |
| Diurnal AMP 17 | Zea mays | Polypeptide | SEQ ID NO: 371 |
| Diurnal AMP 18 | Zea mays | Polynucleotide | SEQ ID NO: 372 |
| Diurnal AMP 18 | Zea mays | Polypeptide | SEQ ID NO: 373 |
| Diurnal AMP 19 | Zea mays | Polynucleotide | SEQ ID NO: 374 |
| Diurnal AMP 19 | Zea mays | Polypeptide | SEQ ID NO: 375 |
| Diurnal AMP 20 | Zea mays | Polynucleotide | SEQ ID NO: 376 |
| Diurnal AMP 20 | Zea mays | Polypeptide | SEQ ID NO: 377 |
| Diurnal AMP 21 | Zea mays | Polynucleotide | SEQ ID NO: 378 |
| Diurnal AMP 21 | Zea mays | Polypeptide | SEQ ID NO: 379 |
| Diurnal AMP 22 | Zea mays | Polynucleotide | SEQ ID NO: 380 |
| Diurnal AMP 22 | Zea mays | Polypeptide | SEQ ID NO: 381 |
| Diurnal AMP 23 | Zea mays | Polynucleotide | SEQ ID NO: 382 |
| Diurnal AMP 23 | Zea mays | Polypeptide | SEQ ID NO: 383 |
| Diurnal AMP 24 | Zea mays | Polynucleotide | SEQ ID NO: 384 |
| Diurnal AMP 24 | Zea mays | Polypeptide | SEQ ID NO: 385 |
| Diurnal AMP 25 | Zea mays | Polynucleotide | SEQ ID NO: 386 |
| Diurnal AMP 25 | Zea mays | Polypeptide | SEQ ID NO: 387 |
| Diurnal AMP 26 | Zea mays | Polynucleotide | SEQ ID NO: 388 |
| Diurnal AMP 26 | Zea mays | Polypeptide | SEQ ID NO: 389 |
| Diurnal AMP 27 | Zea mays | Polynucleotide | SEQ ID NO: 390 |
| Diurnal AMP 27 | Zea mays | Polypeptide | SEQ ID NO: 391 |
| Diurnal AMP 28 | Zea mays | Polynucleotide | SEQ ID NO: 392 |
| Diurnal AMP 28 | Zea mays | Polypeptide | SEQ ID NO: 393 |
| Diurnal AMP 29 | Zea mays | Polynucleotide | SEQ ID NO: 394 |
| Diurnal AMP 29 | Zea mays | Polypeptide | SEQ ID NO: 395 |
| Diurnal AMP 30 | Zea mays | Polynucleotide | SEQ ID NO: 396 |
| Diurnal AMP 30 | Zea mays | Polypeptide | SEQ ID NO: 397 |
| Diurnal AMP 31 | Zea mays | Polynucleotide | SEQ ID NO: 398 |
| Diurnal AMP 31 | Zea mays | Polypeptide | SEQ ID NO: 399 |
| Diurnal AMP 32 | Zea mays | Polynucleotide | SEQ ID NO: 400 |
| Diurnal AMP 32 | Zea mays | Polypeptide | SEQ ID NO: 401 |
| Diurnal AMP 33 | Zea mays | Polynucleotide | SEQ ID NO: 402 |
| Diurnal AMP 33 | Zea mays | Polypeptide | SEQ ID NO: 403 |
| Diurnal AMP 34 | Zea mays | Polynucleotide | SEQ ID NO: 404 |
| Diurnal AMP 34 | Zea mays | Polypeptide | SEQ ID NO: 405 |
| Diurnal AMP 35 | Zea mays | Polynucleotide | SEQ ID NO: 406 |
| Diurnal AMP 35 | Zea mays | Polypeptide | SEQ ID NO: 407 |
| Diurnal AMP 36 | Zea mays | Polynucleotide | SEQ ID NO: 408 |
| Diurnal AMP 36 | Zea mays | Polypeptide | SEQ ID NO: 409 |
| Diurnal AMP 37 | Zea mays | Polynucleotide | SEQ ID NO: 410 |
| Diurnal AMP 37 | Zea mays | Polypeptide | SEQ ID NO: 411 |
| Diurnal AMP 38 | Zea mays | Polynucleotide | SEQ ID NO: 412 |
| Diurnal AMP 38 | Zea mays | Polypeptide | SEQ ID NO: 413 |
| Diurnal AMP 39 | Zea mays | Polynucleotide | SEQ ID NO: 414 |
| Diurnal AMP 39 | Zea mays | Polypeptide | SEQ ID NO: 415 |
| Diurnal AMP 40 | Zea mays | Polynucleotide | SEQ ID NO: 416 |
| Diurnal AMP 40 | Zea mays | Polypeptide | SEQ ID NO: 417 |
| Diurnal AMP 41 | Zea mays | Polynucleotide | SEQ ID NO: 418 |
| Diurnal AMP 41 | Zea mays | Polypeptide | SEQ ID NO: 419 |
| Diurnal AMP 42 | Zea mays | Polynucleotide | SEQ ID NO: 420 |
| Diurnal AMP 42 | Zea mays | Polypeptide | SEQ ID NO: 421 |
| Diurnal AMP 43 | Zea mays | Polynucleotide | SEQ ID NO: 422 |
| Diurnal AMP 43 | Zea mays | Polypeptide | SEQ ID NO: 423 |
| Diurnal AMP 44 | Zea mays | Polynucleotide | SEQ ID NO: 424 |
| Diurnal AMP 44 | Zea mays | Polypeptide | SEQ ID NO: 425 |
| Diurnal AMP 45 | Zea mays | Polynucleotide | SEQ ID NO: 426 |
| Diurnal AMP 45 | Zea mays | Polypeptide | SEQ ID NO: 427 |
| Diurnal AMP 46 | Zea mays | Polynucleotide | SEQ ID NO: 428 |
| Diurnal AMP 46 | Zea mays | Polypeptide | SEQ ID NO: 429 |
| Diurnal AMP 47 | Zea mays | Polynucleotide | SEQ ID NO: 430 |
| Diurnal AMP 47 | Zea mays | Polypeptide | SEQ ID NO: 431 |
| Diurnal AMP 48 | Zea mays | Polynucleotide | SEQ ID NO: 432 |
| Diurnal AMP 48 | Zea mays | Polypeptide | SEQ ID NO: 433 |
| Diurnal AMP 49 | Zea mays | Polynucleotide | SEQ ID NO: 434 |
| Diurnal AMP 49 | Zea mays | Polypeptide | SEQ ID NO: 435 |
| Diurnal AMP 50 | Zea mays | Polynucleotide | SEQ ID NO: 436 |
| Diurnal AMP 50 | Zea mays | Polypeptide | SEQ ID NO: 437 |
| Diurnal AMP 51 | Zea mays | Polynucleotide | SEQ ID NO: 438 |
| Diurnal AMP 51 | Zea mays | Polypeptide | SEQ ID NO: 439 |
| Diurnal AMP 52 | Zea mays | Polynucleotide | SEQ ID NO: 440 |
| Diurnal AMP 52 | Zea mays | Polypeptide | SEQ ID NO: 441 |
| Diurnal AMP 53 | Zea mays | Polynucleotide | SEQ ID NO: 442 |
| Diurnal AMP 53 | Zea mays | Polypeptide | SEQ ID NO: 443 |
| Diurnal AMP 54 | Zea mays | Polynucleotide | SEQ ID NO: 444 |
| Diurnal AMP 54 | Zea mays | Polypeptide | SEQ ID NO: 445 |
| Diurnal AMP 55 | Zea mays | Polynucleotide | SEQ ID NO: 446 |
| Diurnal AMP 55 | Zea mays | Polypeptide | SEQ ID NO: 447 |
| Diurnal AMP 56 | Zea mays | Polynucleotide | SEQ ID NO: 448 |
| Diurnal AMP 56 | Zea mays | Polypeptide | SEQ ID NO: 449 |
| Diurnal AMP 57 | Zea mays | Polynucleotide | SEQ ID NO: 450 |
| Diurnal AMP 57 | Zea mays | Polypeptide | SEQ ID NO: 451 |
| Diurnal AMP 58 | Zea mays | Polynucleotide | SEQ ID NO: 452 |
| Diurnal AMP 58 | Zea mays | Polypeptide | SEQ ID NO: 453 |
| Diurnal AMP 59 | Zea mays | Polynucleotide | SEQ ID NO: 454 |
| Diurnal AMP 59 | Zea mays | Polypeptide | SEQ ID NO: 455 |
| Diurnal AMP 60 | Zea mays | Polynucleotide | SEQ ID NO: 456 |
| Diurnal AMP 60 | Zea mays | Polypeptide | SEQ ID NO: 457 |
| Diurnal AMP 61 | Zea mays | Polynucleotide | SEQ ID NO: 458 |
| Diurnal AMP 61 | Zea mays | Polypeptide | SEQ ID NO: 459 |
| Diurnal AMP 62 | Zea mays | Polynucleotide | SEQ ID NO: 460 |
| Diurnal AMP 62 | Zea mays | Polypeptide | SEQ ID NO: 461 |
| Diurnal AMP 63 | Zea mays | Polynucleotide | SEQ ID NO: 462 |
| Diurnal AMP 63 | Zea mays | Polypeptide | SEQ ID NO: 463 |
| Diurnal AMP 64 | Zea mays | Polynucleotide | SEQ ID NO: 464 |
| Diurnal AMP 64 | Zea mays | Polypeptide | SEQ ID NO: 465 |
| Diurnal AMP 65 | Zea mays | Polynucleotide | SEQ ID NO: 466 |
| Diurnal AMP 65 | Zea mays | Polypeptide | SEQ ID NO: 467 |
| Diurnal AMP 66 | Zea mays | Polynucleotide | SEQ ID NO: 468 |
| Diurnal AMP 66 | Zea mays | Polypeptide | SEQ ID NO: 469 |
| Diurnal AMP 67 | Zea mays | Polynucleotide | SEQ ID NO: 470 |
| Diurnal AMP 67 | Zea mays | Polypeptide | SEQ ID NO: 471 |

### Construction of Nucleic Acids

[0143] The isolated nucleic acids of the present disclosure can be made using: (a) standard recombinant methods, (b) synthetic techniques or combinations thereof. In some embodiments, the polynucleotides of the present disclosure will be cloned, amplified or otherwise constructed from a fungus or bacteria.

[0144] The nucleic acids may conveniently comprise sequences in addition to a polynucleotide of the present disclosure. For example, a multi-cloning site comprising one or more endonuclease restriction sites may be inserted into the nucleic acid to aid in isolation of the polynucleotide. Also, translatable sequences may be inserted to aid in the isolation of the translated polynucleotide of the present disclosure. For example, a hexa-histidine marker sequence provides a convenient means to purify the proteins of the present disclosure. The nucleic acid of the present disclosure, excluding the polynucleotide sequence, is optionally a vector, adapter or linker for cloning and/or expression of a polynucleotide of the present disclosure. Additional sequences may be added to such cloning and/or expression sequences to optimize their function in cloning and/or expression, to aid in isolation of the polynucleotide or to improve the introduction of the polynucleotide into a cell. Typically, the length of a nucleic acid of the present disclosure less the length of its polynucleotide of the present disclosure is less than 20 kilobase pairs, often less than 15 kb and frequently less than 10 kb. Use of cloning vectors, expression vectors, adapters and linkers is well known in the art. Exemplary nucleic acids include such vectors as: M13, lambda ZAP Express, lambda ZAP II, lambda gt10, lambda gt11, pBK-CMV, pBK-RSV, pBluescript II, lambda DASH II, lambda EMBL 3, lambda EMBL 4, pWE15, SuperCos 1, SurfZap, Uni-ZAP, pBC, pBS+/−, pSG5, pBK, pCR-Script, pET, pSPUTK, p3′SS, pGEM, pSK+/−, pGEX, pSPORTI and II, pOPRSVI CAT, pOPI3 CAT, pXT1, pSG5, pPbac, pMbac, pMC1neo, pOG44, pOG45, pFRTβGAL, pNEOβGAL, pRS403, pRS404, pRS405, pRS406, pRS413, pRS414, pRS415, pRS416, lambda MOSSlox and lambda MOSElox. Optional vectors for the present disclosure, include but are not limited to, lambda ZAP II and pGEX. For a description of various nucleic acids see, e.g., Stratagene Cloning Systems, Catalogs 1995, 1996, 1997 (La Jolla, Calif.) and, Amersham Life Sciences, Inc, Catalog '97 (Arlington Heights, Ill.).

### Synthetic Methods for Constructing Nucleic Acids

[0145] The isolated nucleic acids of the present disclosure can also be prepared by direct chemical synthesis by methods such as the phosphotriester method of Narang, et al., (1979) Meth. Enzymol. 68:90-9; the phosphodiester method of Brown, et al., (1979) Meth. Enzymol. 68:109-51; the diethylphosphoramidite method of Beaucage et al., (1981) Tetra. Letts. 22(20):1859-62; the solid phase phosphoramidite triester method described by Beaucage, et al., supra, e.g., using an automated synthesizer, e.g., as described in Needham-VanDevanter, et al., (1984) Nucleic Acids Res. 12:6159-68 and the solid support method of U.S. Pat. No. 4,458,066. Chemical synthesis generally produces a single stranded oligonucleotide. This may be converted into double stranded DNA by hybridization with a complementary sequence or by polymerization with a DNA polymerase using the single strand as a template. One of skill will recognize that while chemical synthesis of DNA is limited to sequences of about 100 bases, longer sequences may be obtained by the ligation of shorter sequences.

### UTRs and Codon Preference

[0146] In general, translational efficiency has been found to be regulated by specific sequence elements in the 5′ non-coding or untranslated region (5′ UTR) of the RNA. Positive sequence motifs include translational initiation consensus sequences (Kozak, (1987) Nucleic Acids Res. 15:8125) and the 5<G>7 methyl GpppG RNA cap structure (Drummond, et al., (1985) Nucleic Acids Res. 13:7375). Negative elements include stable intramolecular 5′ UTR stem-loop structures (Muesing, et al., (1987) Cell 48:691) and AUG sequences or short open reading frames preceded by an appropriate AUG in the 5′ UTR (Kozak, supra, Rao, et al., (1988) Mol. and Cell. Biol. 8:284). Accordingly, the present disclosure provides 5′ and/or 3′ UTR regions for modulation of translation of heterologous coding sequences.

[0147] Further, the polypeptide-encoding segments of the polynucleotides of the present disclosure can be modified to alter codon usage. Altered codon usage can be employed to alter translational efficiency and/or to optimize the coding sequence for expression in a desired host or to optimize the codon usage in a heterologous sequence for expression in maize. Codon usage in the coding regions of the polynucleotides of the present disclosure can be analyzed statistically using commercially available software packages such as “Codon Preference” available from the University of Wisconsin Genetics Computer Group. See, Devereaux, et al., (1984) Nucleic Acids Res. 12:387-395; or MacVector 4.1 (Eastman Kodak Co., New Haven, Conn.). Thus, the present disclosure provides a codon usage frequency characteristic of the coding region of at least one of the polynucleotides of the present disclosure. The number of polynucleotides (3 nucleotides per amino acid) that can be used to determine a codon usage frequency can be any integer from 3 to the number of polynucleotides of the present disclosure as provided herein. Optionally, the polynucleotides will be full-length sequences. An exemplary number of sequences for statistical analysis can be at least 1, 5, 10, 20, 50 or 100.

### Sequence Shuffling

[0148] The present disclosure provides methods for sequence shuffling using polynucleotides of the present disclosure, and compositions resulting therefrom. Sequence shuffling is described in PCT Publication Number 96/19256. See also, Zhang, et al., (1997) Proc. Natl. Acad. Sci. USA 94:4504-9 and Zhao, et al., (1998) Nature Biotech 16:258-61. Generally, sequence shuffling provides a means for generating libraries of polynucleotides having a desired characteristic, which can be selected or screened for. Libraries of recombinant polynucleotides are generated from a population of related sequence polynucleotides, which comprise sequence regions, which have substantial sequence identity and can be homologously recombined in vitro or in vivo. The population of sequence-recombined polynucleotides comprises a subpopulation of polynucleotides which possess desired or advantageous characteristics and which can be selected by a suitable selection or screening method. The characteristics can be any property or attribute capable of being selected for or detected in a screening system, and may include properties of: an encoded protein, a transcriptional element, a sequence controlling transcription, RNA processing, RNA stability, chromatin conformation, translation or other expression property of a gene or transgene, a replicative element, a protein-binding element or the like, such as any feature which confers a selectable or detectable property. In some embodiments, the selected characteristic will be an altered Kₘ and/or K_{cat} over the wild-type protein as provided herein. In other embodiments, a protein or polynucleotide generated from sequence shuffling will have a ligand binding affinity greater than the non-shuffled wild-type polynucleotide. In yet other embodiments, a protein or polynucleotide generated from sequence shuffling will have an altered pH optimum as compared to the non-shuffled wild-type polynucleotide. The increase in such properties can be at least 110%, 120%, 130%, 140% or greater than 150% of the wild-type value.

### Recombinant Expression Cassettes

[0149] The present disclosure further provides recombinant expression cassettes comprising a nucleic acid of the present disclosure. A nucleic acid sequence coding for the desired polynucleotide of the present disclosure, for example a cDNA or a genomic sequence encoding a polypeptide long enough to code for an active protein of the present disclosure, can be used to construct a recombinant expression cassette which can be introduced into the desired host cell. A recombinant expression cassette will typically comprise a polynucleotide of the present disclosure operably linked to transcriptional initiation regulatory sequences which will direct the transcription of the polynucleotide in the intended host cell, such as tissues of a transformed plant.

[0150] For example, plant expression vectors may include: (1) a cloned plant gene under the transcriptional control of 5′ and 3′ regulatory sequences and (2) a dominant selectable marker. Such plant expression vectors may also contain, if desired, a promoter regulatory region (e.g., one conferring inducible or constitutive, environmentally- or developmentally-regulated or cell- or tissue-specific/selective expression), a transcription initiation start site, a ribosome binding site, an RNA processing signal, a transcription termination site and/or a polyadenylation signal.

[0151] A plant promoter fragment can be employed which will direct expression of a polynucleotide of the present disclosure in all tissues of a regenerated plant. Such promoters are referred to herein as “constitutive” promoters and are active under most environmental conditions and states of development or cell differentiation. Examples of constitutive promoters include the 1′- or 2′-promoter derived from T-DNA of Agrobacterium tumefaciens, the Smas promoter, the cinnamyl alcohol dehydrogenase promoter (U.S. Pat. No. 5,683,439), the Nos promoter, the rubisco promoter, the GRP1-8 promoter, the ³⁵S promoter from cauliflower mosaic virus (CaMV), as described in Odell, et al., (1985) Nature 313:810-2; rice actin (McElroy, et al., (1990) Plant Cell 163-171); ubiquitin (Christensen, et al., (1992) Plant Mol. Biol. 12:619-632 and Christensen, et al., (1992) Plant Mol. Biol. 18:675-89); pEMU (Last, et al., (1991) Theor. Appl. Genet. 81:581-8); MAS (Velten, et al., (1984) EMBO J. 3:2723-30) and maize H3 histone (Lepetit, et al., (1992) Mol. Gen. Genet. 231:276-85 and Atanassvoa, et al., (1992) Plant Journal 2(3):291-300); ALS promoter, as described in PCT Application Publication Number WO 96/30530; GOS2 (U.S. Pat. No. 6,504,083) and other transcription initiation regions from various plant genes known to those of skill. For the present disclosure ubiquitin is the preferred promoter for expression in monocot plants.

[0152] Alternatively, the plant promoter can direct expression of a polynucleotide of the present disclosure in a specific tissue or may be otherwise under more precise environmental or developmental control. Such promoters are referred to here as “inducible” promoters (Rab17, RAD29). Environmental conditions that may effect transcription by inducible promoters include pathogen attack, anaerobic conditions or the presence of light. Examples of inducible promoters are the Adh1 promoter, which is inducible by hypoxia or cold stress, the Hsp70 promoter, which is inducible by heat stress and the PPDK promoter, which is inducible by light.

[0153] Examples of promoters under developmental control include promoters that initiate transcription only, or preferentially, in certain tissues, such as leaves, roots, fruit, seeds or flowers. The operation of a promoter may also vary depending on its location in the genome. Thus, an inducible promoter may become fully or partially constitutive in certain locations.

[0154] If polypeptide expression is desired, it is generally desirable to include a polyadenylation region at the 3′-end of a polynucleotide coding region. The polyadenylation region can be derived from a variety of plant genes, or from T-DNA. The 3′ end sequence to be added can be derived from, for example, the nopaline synthase or octopine synthase genes or alternatively from another plant gene or less preferably from any other eukaryotic gene. Examples of such regulatory elements include, but are not limited to, 3′ termination and/or polyadenylation regions such as those of the Agrobacterium tumefaciens nopaline synthase (nos) gene (Bevan, et al., (1983) Nucleic Acids Res. 12:369-85); the potato proteinase inhibitor II (PINII) gene (Keil, et al., (1986) Nucleic Acids Res. 14:5641-50 and An, et al., (1989) Plant Cell 1:115-22) and the CaMV 19S gene (Mogen, et al., (1990) Plant Cell 2:1261-72).

[0155] An intron sequence can be added to the 5′ untranslated region or the coding sequence of the partial coding sequence to increase the amount of the mature message that accumulates in the cytosol. Inclusion of a spliceable intron in the transcription unit in both plant and animal expression constructs has been shown to increase gene expression at both the mRNA and protein levels up to 1000-fold (Buchman and Berg, (1988) Mol. Cell. Biol. 8:4395-4405; Callis, et al., (1987) Genes Dev. 1:1183-200). Such intron enhancement of gene expression is typically greatest when placed near the 5′ end of the transcription unit. Use of maize introns Adh1-S intron 1, 2 and 6, the Bronze-1 intron are known in the art. See generally, THE MAIZE HANDBOOK, Chapter 116, Freeling and Walbot, eds., Springer, New York (1994).

[0156] Plant signal sequences, including, but not limited to, signal-peptide encoding DNA/RNA sequences which target proteins to the extracellular matrix of the plant cell (Dratewka-Kos, et al., (1989) J. Biol. Chem. 264:4896-900), such as the Nicotiana plumbaginifolia extension gene (DeLoose, et al., (1991) Gene 99:95-100); signal peptides which target proteins to the vacuole, such as the sweet potato sporamin gene (Matsuka, et al., (1991) Proc. Natl. Acad. Sci. USA 88:834) and the barley lectin gene (Wilkins, et al., (1990) Plant Cell, 2:301-13); signal peptides which cause proteins to be secreted, such as that of PRIb (Lind, et al., (1992) Plant Mol. Biol. 18:47-53) or the barley alpha amylase (BAA) (Rahmatullah, et al., (1989) Plant Mol. Biol. 12:119 and hereby incorporated by reference) or signal peptides which target proteins to the plastids such as that of rapeseed enoyl-Acp reductase (Verwaert, et al., (1994) Plant Mol. Biol. 26:189-202) are useful in the disclosure. The barley alpha amylase signal sequence fused to the diurnal polynucleotide is the preferred construct for expression in maize for the present disclosure.

[0157] The vector comprising the sequences from a polynucleotide of the present disclosure will typically comprise a marker gene, which confers a selectable phenotype on plant cells. Usually, the selectable marker gene will encode antibiotic resistance, with suitable genes including genes coding for resistance to the antibiotic spectinomycin (e.g., the aada gene), the streptomycin phosphotransferase (SPT) gene coding for streptomycin resistance, the neomycin phosphotransferase (NPTII) gene encoding kanamycin or geneticin resistance, the hygromycin phosphotransferase (HPT) gene coding for hygromycin resistance, genes coding for resistance to herbicides which act to inhibit the action of acetolactate synthase (ALS), in particular the sulfonylurea-type herbicides (e.g., the acetolactate synthase (ALS) gene containing mutations leading to such resistance in particular the S4 and/or Hra mutations), genes coding for resistance to herbicides which act to inhibit action of glutamine synthase, such as phosphinothricin or basta (e.g., the bar gene) or other such genes known in the art. The bar gene encodes resistance to the herbicide basta, and the ALS gene encodes resistance to the herbicide chlorsulfuron.

[0158] Typical vectors useful for expression of genes in higher plants are well known in the art and include vectors derived from the tumor-inducing (Ti) plasmid of Agrobacterium tumefaciens described by Rogers, et al., (1987) Meth. Enzymol. 153:253-77. These vectors are plant integrating vectors in that on transformation, the vectors integrate a portion of vector DNA into the genome of the host plant. Exemplary A. tumefaciens vectors useful herein are plasmids pKYLX6 and pKYLX7 of Schardl, et al., (1987) Gene 61:1-11 and Berger, et al., (1989) Proc. Natl. Acad. Sci. USA, 86:8402-6. Another useful vector herein is plasmid pBI101.2 that is available from CLONTECH Laboratories, Inc. (Palo Alto, Calif.).

### Expression of Proteins in Host Cells

[0159] Using the nucleic acids of the present disclosure, one may express a protein of the present disclosure in a recombinantly engineered cell such as bacteria, yeast, insect, mammalian or preferably plant cells. The cells produce the protein in a non-natural condition (e.g., in quantity, composition, location and/or time), because they have been genetically altered through human intervention to do so.

[0160] It is expected that those of skill in the art are knowledgeable in the numerous expression systems available for expression of a nucleic acid encoding a protein of the present disclosure. No attempt to describe in detail the various methods known for the expression of proteins in prokaryotes or eukaryotes will be made.

[0161] In brief summary, the expression of isolated nucleic acids encoding a protein of the present disclosure will typically be achieved by operably linking, for example, the DNA or cDNA to a promoter (which is either constitutive or inducible), followed by incorporation into an expression vector. The vectors can be suitable for replication and integration in either prokaryotes or eukaryotes. Typical expression vectors contain transcription and translation terminators, initiation sequences and promoters useful for regulation of the expression of the DNA encoding a protein of the present disclosure. To obtain high level expression of a cloned gene, it is desirable to construct expression vectors which contain, at the minimum, a strong promoter, such as ubiquitin, to direct transcription, a ribosome binding site for translational initiation and a transcription/translation terminator. Constitutive promoters are classified as providing for a range of constitutive expression. Thus, some are weak constitutive promoters and others are strong constitutive promoters. Generally, by “weak promoter” is intended a promoter that drives expression of a coding sequence at a low level. By “low level” is intended at levels of about 1/10,000 transcripts to about 1/100,000 transcripts to about 1/500,000 transcripts. Conversely, a “strong promoter” drives expression of a coding sequence at a “high level” or about 1/10 transcripts to about 1/100 transcripts to about 1/1,000 transcripts.

[0162] One of skill would recognize that modifications could be made to a protein of the present disclosure without diminishing its biological activity. Some modifications may be made to facilitate the cloning, expression or incorporation of the targeting molecule into a fusion protein. Such modifications are well known to those of skill in the art and include, for example, a methionine added at the amino terminus to provide an initiation site or additional amino acids (e.g., poly His) placed on either terminus to create conveniently located restriction sites or termination codons or purification sequences.

### Expression in Prokaryotes

[0163] Prokaryotic cells may be used as hosts for expression. Prokaryotes most frequently are represented by various strains of E. coli; however, other microbial strains may also be used. Commonly used prokaryotic control sequences which are defined herein to include promoters for transcription initiation, optionally with an operator, along with ribosome binding site sequences, include such commonly used promoters as the beta lactamase (penicillinase) and lactose (lac) promoter systems (Chang, et al., (1977) Nature 198:1056), the tryptophan (trp) promoter system (Goeddel, et al., (1980) Nucleic Acids Res. 8:4057) and the lambda derived P L promoter and N-gene ribosome binding site (Shimatake, et al., (1981) Nature 292:128). The inclusion of selection markers in DNA vectors transfected in E. coli is also useful. Examples of such markers include genes specifying resistance to ampicillin, tetracycline or chloramphenicol.

[0164] The vector is selected to allow introduction of the gene of interest into the appropriate host cell. Bacterial vectors are typically of plasmid or phage origin. Appropriate bacterial cells are infected with phage vector particles or transfected with naked phage vector DNA. If a plasmid vector is used, the bacterial cells are transfected with the plasmid vector DNA. Expression systems for expressing a protein of the present disclosure are available using Bacillus sp. and Salmonella (Palva, et al., (1983) Gene 22:229-35; Mosbach, et al., (1983) Nature 302:543-5). The pGEX-4T-1 plasmid vector from Pharmacia is the preferred E. coli expression vector for the present disclosure.

### Expression in Eukaryotes

[0165] A variety of eukaryotic expression systems such as yeast, insect cell lines, plant and mammalian cells, are known to those of skill in the art. As explained briefly below, the present disclosure can be expressed in these eukaryotic systems. In some embodiments, transformed/transfected plant cells, as discussed infra, are employed as expression systems for production of the proteins of the instant disclosure.

[0166] Synthesis of heterologous proteins in yeast is well known. Sherman, et al., (1982) METHODS IN YEAST GENETICS, Cold Spring Harbor Laboratory is a well recognized work describing the various methods available to produce the protein in yeast. Two widely utilized yeasts for production of eukaryotic proteins are Saccharomyces cerevisiae and Pichia pastoris. Vectors, strains and protocols for expression in Saccharomyces and Pichia are known in the art and available from commercial suppliers (e.g., Invitrogen). Suitable vectors usually have expression control sequences, such as promoters, including 3-phosphoglycerate kinase or alcohol oxidase and an origin of replication, termination sequences and the like as desired.

[0167] A protein of the present disclosure, once expressed, can be isolated from yeast by lysing the cells and applying standard protein isolation techniques to the lysates or the pellets. The monitoring of the purification process can be accomplished by using Western blot techniques or radioimmunoassay of other standard immunoassay techniques.

[0168] The sequences encoding proteins of the present disclosure can also be ligated to various expression vectors for use in transfecting cell cultures of, for instance, mammalian, insect or plant origin. Mammalian cell systems often will be in the form of monolayers of cells although mammalian cell suspensions may also be used. A number of suitable host cell lines capable of expressing intact proteins have been developed in the art, and include the HEK293, BHK21 and CHO cell lines. Expression vectors for these cells can include expression control sequences, such as an origin of replication, a promoter (e.g., the CMV promoter, a HSV tk promoter or pgk (phosphoglycerate kinase) promoter), an enhancer (Queen, et al., (1986) Immunol. Rev. 89:49) and necessary processing information sites, such as ribosome binding sites, RNA splice sites, polyadenylation sites (e.g., an SV40 large T Ag poly A addition site) and transcriptional terminator sequences. Other animal cells useful for production of proteins of the present disclosure are available, for instance, from the American Type Culture Collection Catalogue of Cell Lines and Hybridomas (7^{th} ed., 1992).

[0169] Appropriate vectors for expressing proteins of the present disclosure in insect cells are usually derived from the SF9 baculovirus. Suitable insect cell lines include mosquito larvae, silkworm, armyworm, moth and Drosophila cell lines such as a Schneider cell line (see, e.g., Schneider, (1987) J. Embryol. Exp. Morphol. 27:353-65).

[0170] As with yeast, when higher animal or plant host cells are employed, polyadenlyation or transcription terminator sequences are typically incorporated into the vector. An example of a terminator sequence is the polyadenlyation sequence from the bovine growth hormone gene. Sequences for accurate splicing of the transcript may also be included. An example of a splicing sequence is the VP1 intron from SV40 (Sprague, et al., (1983) J. Virol. 45:773-81). Additionally, gene sequences to control replication in the host cell may be incorporated into the vector such as those found in bovine papilloma virus type-vectors (Saveria-Campo, “Bovine Papilloma Virus DNA a Eukaryotic Cloning Vector,” in DNA CLONING: A PRACTICAL APPROACH, vol. II, Glover, ed., IRL Press, Arlington, Va., pp. 213-38 (1985)).

[0171] In addition, the gene for diurnal expression placed in the appropriate plant expression vector can be used to transform plant cells. The polypeptide can then be isolated from plant callus or the transformed cells can be used to regenerate transgenic plants. Such transgenic plants can be harvested and the appropriate tissues (seed or leaves, for example) can be subjected to large scale protein extraction and purification techniques.

### Plant Transformation Methods

[0172] Numerous methods for introducing foreign genes into plants are known and can be used to insert a diurnal polynucleotide into a plant host, including biological and physical plant transformation protocols. See, e.g., Miki, et al., “Procedure for Introducing Foreign DNA into Plants,” in METHODS IN PLANT MOLECULAR BIOLOGY AND BIOTECHNOLOGY, Glick and Thompson, eds., CRC Press, Inc., Boca Raton, pp. 67-88 (1993). The methods chosen vary with the host plant, and include chemical transfection methods such as calcium phosphate, microorganism-mediated gene transfer such as Agrobacterium (Horsch, et al., (1985) Science 227:1229-31), electroporation, micro-injection and biolistic bombardment.

[0173] Expression cassettes and vectors and in vitro culture methods for plant cell or tissue transformation and regeneration of plants are known and available. See, e.g., Gruber, et al., “Vectors for Plant Transformation,” in METHODS IN PLANT MOLECULAR BIOLOGY AND BIOTECHNOLOGY, supra, pp. 89-119.

[0174] The isolated polynucleotides or polypeptides may be introduced into the plant by one or more techniques typically used for direct delivery into cells. Such protocols may vary depending on the type of organism, cell, plant or plant cell, i.e., monocot or dicot, targeted for gene modification. Suitable methods of transforming plant cells include microinjection (Crossway, et al., (1986) Biotechniques 4:320-334 and U.S. Pat. No. 6,300,543), electroporation (Riggs, et al., (1986) Proc. Natl. Acad. Sci. USA 83:5602-5606, direct gene transfer (Paszkowski, et al., (1984) EMBO J. 3:2717-2722) and ballistic particle acceleration (see, for example, Sanford, et al., U.S. Pat. No. 4,945,050; WO 91/10725 and McCabe, et al., (1988) Biotechnology 6:923-926). Also see, Tomes, et al., Direct DNA Transfer into Intact Plant Cells Via Microprojectile Bombardment. pp. 197-213 in Plant Cell, Tissue and Organ Culture, Fundamental Methods eds. Gamborg and Phillips, Springer-Verlag Berlin Heidelberg New York, 1995; U.S. Pat. No. 5,736,369 (meristem); Weissinger, et al., (1988) Ann. Rev. Genet. 22:421-477; Sanford, et al., (1987) Particulate Science and Technology 5:27-37 (onion); Christou, et al., (1988) Plant Physiol. 87:671-674 (soybean); Datta, et al., (1990) Biotechnology 8:736-740 (rice); Klein, et al., (1988) Proc. Natl. Acad. Sci. USA 85:4305-4309 (maize); Klein, et al., (1988) Biotechnology 6:559-563 (maize); WO 91/10725 (maize); Klein, et al., (1988) Plant Physiol. 91:440-444 (maize); Fromm, et al., (1990) Biotechnology 8:833-839 and Gordon-Kamm, et al., (1990) Plant Cell 2:603-618 (maize); Hooydaas-Van Slogteren and Hooykaas (1984) Nature (London) 311:763-764; Bytebier, et al., (1987) Proc. Natl. Acad. Sci. USA 84:5345-5349 (Liliaceae); De Wet, et al., (1985) In The Experimental Manipulation of Ovule Tissues, ed. Chapman, et al., pp. 197-209; Longman, N.Y. (pollen); Kaeppler, et al., (1990) Plant Cell Reports 9:415-418; and Kaeppler, et al., (1992) Theor. Appl. Genet. 84:560-566 (whisker-mediated transformation); U.S. Pat. No. 5,693,512 (sonication); D'Halluin, et al., (1992) Plant Cell 4:1495-1505 (electroporation); Li, et al., (1993) Plant Cell Reports 12:250-255 and Christou and Ford (1995) Annals of Botany 75:407-413 (rice); Osjoda, et al., (1996) Nature Biotech. 14:745-750; Agrobacterium mediated maize transformation (U.S. Pat. No. 5,981,840); silicon carbide whisker methods (Frame, et al., (1994) Plant J. 6:941-948); laser methods (Guo, et al., (1995) Physiologia Plantarum 93:19-24); sonication methods (Bao, et al., (1997) Ultrasound in Medicine & Biology 23:953-959; Finer and Finer, (2000) Lett Appl Microbiol. 30:406-10; Amoah, et al., (2001) J Exp Bot 52:1135-42); polyethylene glycol methods (Krens, et al., (1982) Nature 296:72-77); protoplasts of monocot and dicot cells can be transformed using electroporation (Fromm, et al., (1985) Proc. Natl. Acad. Sci. USA 82:5824-5828) and microinjection (Crossway, et al., (1986) Mol. Gen. Genet. 202:179-185), all of which are herein incorporated by reference.

### Agrobacterium-Mediated Transformation

[0175] The most widely utilized method for introducing an expression vector into plants is based on the natural transformation system of Agrobacterium. A. tumefaciens and A. rhizogenes are plant pathogenic soil bacteria, which genetically transform plant cells. The Ti and Ri plasmids of A. tumefaciens and A. rhizogenes, respectively, carry genes responsible for genetic transformation of plants. See, e.g., Kado, (1991) Crit. Rev. Plant Sci. 10:1. Descriptions of the Agrobacterium vector systems and methods for Agrobacterium-mediated gene transfer are provided in Gruber, et al., supra; Miki, et al., supra and Moloney, et al., (1989) Plant Cell Reports 8:238.

[0176] Similarly, the gene can be inserted into the T-DNA region of a Ti or Ri plasmid derived from A. tumefaciens or A. rhizogenes, respectively. Thus, expression cassettes can be constructed as above, using these plasmids. Many control sequences are known which when coupled to a heterologous coding sequence and transformed into a host organism show fidelity in gene expression with respect to tissue/organ specificity of the original coding sequence. See, e.g., Benfey and Chua, (1989) Science 244:174-81. Particularly suitable control sequences for use in these plasmids are promoters for constitutive leaf-specific expression of the gene in the various target plants. Other useful control sequences include a promoter and terminator from the nopaline synthase gene (NOS). The NOS promoter and terminator are present in the plasmid pARC2, available from the American Type Culture Collection and designated ATCC 67238. If such a system is used, the virulence (vir) gene from either the Ti or Ri plasmid must also be present, either along with the T-DNA portion or via a binary system where the vir gene is present on a separate vector. Such systems, vectors for use therein, and methods of transforming plant cells are described in U.S. Pat. No. 4,658,082; U.S. patent application Ser. No. 913,914, filed Oct. 1, 1986, as referenced in U.S. Pat. No. 5,262,306, issued Nov. 16, 1993 and Simpson, et al., (1986) Plant Mol. Biol. 6:403-15 (also referenced in the '306 patent), all incorporated by reference in their entirety.

[0177] Once constructed, these plasmids can be placed into A. rhizogenes or A. tumefaciens and these vectors used to transform cells of plant species, which are ordinarily susceptible to Fusarium or Alternaria infection. Several other transgenic plants are also contemplated by the present disclosure including but not limited to soybean, corn, sorghum, alfalfa, rice, clover, cabbage, banana, coffee, celery, tobacco, cowpea, cotton, melon and pepper. The selection of either A. tumefaciens or A. rhizogenes will depend on the plant being transformed thereby. In general A. tumefaciens is the preferred organism for transformation. Most dicotyledonous plants, some gymnosperms and a few monocotyledonous plants (e.g., certain members of the Liliales and Arales) are susceptible to infection with A. tumefaciens. A. rhizogenes also has a wide host range, embracing most dicots and some gymnosperms, which includes members of the Leguminosae, Compositae and Chenopodiaceae. Monocot plants can now be transformed with some success. EP Patent Application Number 604 662 A1 discloses a method for transforming monocots using Agrobacterium. EP Patent Application Number 672 752 A1 discloses a method for transforming monocots with Agrobacterium using the scutellum of immature embryos. Ishida, et al., discuss a method for transforming maize by exposing immature embryos to A. tumefaciens (Nature Biotechnology 14:745-50 (1996)).

[0178] Once transformed, these cells can be used to regenerate transgenic plants. For example, whole plants can be infected with these vectors by wounding the plant and then introducing the vector into the wound site. Any part of the plant can be wounded, including leaves, stems and roots. Alternatively, plant tissue, in the form of an explant, such as cotyledonary tissue or leaf disks, can be inoculated with these vectors and cultured under conditions, which promote plant regeneration. Roots or shoots transformed by inoculation of plant tissue with A. rhizogenes or A. tumefaciens, containing the gene coding for the fumonisin degradation enzyme, can be used as a source of plant tissue to regenerate fumonisin-resistant transgenic plants, either via somatic embryogenesis or organogenesis. Examples of such methods for regenerating plant tissue are disclosed in Shahin, Theor. Appl. Genet. 69:235-40 (1985); U.S. Pat. No. 4,658,082; Simpson, et al., supra and U.S. patent application Ser. Nos. 913,913 and 913,914, both filed Oct. 1, 1986, as referenced in U.S. Pat. No. 5,262,306, issued Nov. 16, 1993, the entire disclosures therein incorporated herein by reference.

### Direct Gene Transfer

[0179] Despite the fact that the host range for Agrobacterium-mediated transformation is broad, some major cereal crop species and gymnosperms have generally been recalcitrant to this mode of gene transfer, even though some success has recently been achieved in rice (Hiei, et al., (1994) The Plant Journal 6:271-82). Several methods of plant transformation, collectively referred to as direct gene transfer, have been developed as an alternative to Agrobacterium-mediated transformation.

[0180] A generally applicable method of plant transformation is microprojectile-mediated transformation, where DNA is carried on the surface of microprojectiles measuring about 1 to 4 μm. The expression vector is introduced into plant tissues with a biolistic device that accelerates the microprojectiles to speeds of 300 to 600 m/s which is sufficient to penetrate the plant cell walls and membranes (Sanford, et al., (1987) Part. Sci. Technol. 5:27; Sanford, (1988) Trends Biotech 6:299; Sanford, (1990) Physiol. Plant 79:206 and Klein, et al., (1992) Biotechnology 10:268).

[0181] Another method for physical delivery of DNA to plants is sonication of target cells as described in Zang, et al., (1991) BioTechnology 9:996. Alternatively, liposome or spheroplast fusions have been used to introduce expression vectors into plants. See, e.g., Deshayes, et al., (1985) EMBO J. 4:2731 and Christou, et al., (1987) Proc. Natl. Acad. Sci. USA 84:3962. Direct uptake of DNA into protoplasts using CaCl₂ precipitation, polyvinyl alcohol, or poly-L-ornithine has also been reported. See, e.g., Hain, et al., (1985) Mol. Gen. Genet. 199:161 and Draper, et al., (1982) Plant Cell Physiol. 23:451.

[0182] Electroporation of protoplasts and whole cells and tissues has also been described. See, e.g., Donn, et al., (1990) in Abstracts of the VIIth Int'l. Congress on Plant Cell and Tissue Culture IAPTC, A2-38, p. 53; D'Halluin, et al., (1992) Plant Cell 4:1495-505 and Spencer, et al., (1994) Plant Mol. Biol. 24:51-61.

Increasing the Activity and/or Level of a Diurnal Polypeptide Encoded by Diurnal Polynucleotides

[0183] Methods are provided to increase the activity and/or level of the diurnal polypeptides encoded by the diurnal polynucleotides of the disclosure. An increase in the level and/or activity of the diurnal polypeptide of the disclosure can be achieved by providing to the plant a diurnal polypeptide. The diurnal polypeptide can be provided by introducing the amino acid sequence encoding the diurnal polypeptide into the plant, introducing into the plant a nucleotide sequence encoding a diurnal polypeptide or alternatively by modifying a genomic locus encoding the diurnal polypeptide of the disclosure.

[0184] As discussed elsewhere herein, many methods are known the art for providing a polypeptide to a plant including, but not limited to, direct introduction of the polypeptide into the plant, introducing into the plant (transiently or stably) a polynucleotide construct encoding a polypeptide having cell number regulator activity. It is also recognized that the methods of the disclosure may employ a polynucleotide that is not capable of directing, in the transformed plant, the expression of a protein or an RNA. Thus, the level and/or activity of a diurnal polypeptide may be increased by altering the gene encoding the diurnal polypeptide or its promoter. See, e.g., Kmiec, U.S. Pat. No. 5,565,350; Zarling, et al., PCT/US93/03868. Therefore mutagenized plants that carry mutations in diurnal genes, where the mutations increase expression of the diurnal gene or increase the plant growth and/or organ development activity of the encoded diurnal polypeptide are provided.

Reducing the Activity and/or Level of a Diurnal Polypeptide

[0185] Methods are provided to reduce or eliminate the activity of a diurnal polypeptide of the disclosure by transforming a plant cell with an expression cassette that expresses a polynucleotide that inhibits the expression of the diurnal polypeptide. The polynucleotide may inhibit the expression of the diurnal polypeptide directly, by preventing translation of the diurnal messenger RNA, or indirectly, by encoding a polypeptide that inhibits the transcription or translation of a diurnal gene encoding a diurnal polypeptide. Methods for inhibiting or eliminating the expression of a gene in a plant are well known in the art, and any such method may be used in the present disclosure to inhibit the expression of a diurnal polypeptide.

[0186] In accordance with the present disclosure, the expression of a diurnal polypeptide is inhibited if the protein level of the diurnal polypeptide is less than 70% of the protein level of the same diurnal polypeptide in a plant that has not been genetically modified or mutagenized to inhibit the expression of that diurnal polypeptide. In particular embodiments of the disclosure, the protein level of the diurnal polypeptide in a modified plant according to the disclosure is less than 60%, less than 50%, less than 40%, less than 30%, less than 20%, less than 10%, less than 5% or less than 2% of the protein level of the same diurnal polypeptide in a plant that is not a mutant or that has not been genetically modified to inhibit the expression of that diurnal polypeptide. The expression level of the diurnal polypeptide may be measured directly, for example, by assaying for the level of diurnal polypeptide expressed in the plant cell or plant, or indirectly, for example, by measuring the plant growth and/or organ development activity of the diurnal polypeptide in the plant cell or plant, or by measuring the biomass in the plant. Methods for performing such assays are described elsewhere herein.

[0187] In other embodiments of the disclosure, the activity of the diurnal polypeptides is reduced or eliminated by transforming a plant cell with an expression cassette comprising a polynucleotide encoding a polypeptide that inhibits the activity of a diurnal polypeptide. The plant growth and/or organ development activity of a diurnal polypeptide is inhibited according to the present disclosure if the plant growth and/or organ development activity of the diurnal polypeptide is less than 70% of the plant growth and/or organ development activity of the same diurnal polypeptide in a plant that has not been modified to inhibit the plant growth and/or organ development activity of that diurnal polypeptide. In particular embodiments of the disclosure, the plant growth and/or organ development activity of the diurnal polypeptide in a modified plant according to the disclosure is less than 60%, less than 50%, less than 40%, less than 30%, less than 20%, less than 10% or less than 5% of the plant growth and/or organ development activity of the same diurnal polypeptide in a plant that that has not been modified to inhibit the expression of that diurnal polypeptide. The plant growth and/or organ development activity of a diurnal polypeptide is “eliminated” according to the disclosure when it is not detectable by the assay methods described elsewhere herein. Methods of determining the plant growth and/or organ development activity of a diurnal polypeptide are described elsewhere herein.

[0188] In other embodiments, the activity of a diurnal polypeptide may be reduced or eliminated by disrupting the gene encoding the diurnal polypeptide. The disclosure encompasses mutagenized plants that carry mutations in diurnal genes, where the mutations reduce expression of the diurnal gene or inhibit the plant growth and/or organ development activity of the encoded diurnal polypeptide.

[0189] Thus, many methods may be used to reduce or eliminate the activity of a diurnal polypeptide. In addition, more than one method may be used to reduce the activity of a single diurnal polypeptide. Non-limiting examples of methods of reducing or eliminating the expression of diurnal polypeptides are given below.

[0190] 1. Polynucleotide-Based Methods:

[0191] In some embodiments of the present disclosure, a plant is transformed with an expression cassette that is capable of expressing a polynucleotide that inhibits the expression of a diurnal polypeptide of the disclosure. The term “expression” as used herein refers to the biosynthesis of a gene product, including the transcription and/or translation of said gene product. For example, for the purposes of the present disclosure, an expression cassette capable of expressing a polynucleotide that inhibits the expression of at least one diurnal polypeptide is an expression cassette capable of producing an RNA molecule that inhibits the transcription and/or translation of at least one diurnal polypeptide of the disclosure. The “expression” or “production” of a protein or polypeptide from a DNA molecule refers to the transcription and translation of the coding sequence to produce the protein or polypeptide, while the “expression” or “production” of a protein or polypeptide from an RNA molecule refers to the translation of the RNA coding sequence to produce the protein or polypeptide.

[0192] Examples of polynucleotides that inhibit the expression of a diurnal polypeptide are given below.

[0193] i. Sense Suppression/Cosuppression

[0194] In some embodiments of the disclosure, inhibition of the expression of a diurnal polypeptide may be obtained by sense suppression or cosuppression. For cosuppression, an expression cassette is designed to express an RNA molecule corresponding to all or part of a messenger RNA encoding a diurnal polypeptide in the “sense” orientation. Over expression of the RNA molecule can result in reduced expression of the native gene. Accordingly, multiple plant lines transformed with the cosuppression expression cassette are screened to identify those that show the greatest inhibition of diurnal polypeptide expression.

[0195] The polynucleotide used for cosuppression may correspond to all or part of the sequence encoding the diurnal polypeptide, all or part of the 5′ and/or 3′ untranslated region of a diurnal polypeptide transcript or all or part of both the coding sequence and the untranslated regions of a transcript encoding a diurnal polypeptide. In some embodiments where the polynucleotide comprises all or part of the coding region for the diurnal polypeptide, the expression cassette is designed to eliminate the start codon of the polynucleotide so that no protein product will be translated.

[0196] Cosuppression may be used to inhibit the expression of plant genes to produce plants having undetectable protein levels for the proteins encoded by these genes. See, for example, Broin, et al., (2002) Plant Cell 14:1417-1432. Cosuppression may also be used to inhibit the expression of multiple proteins in the same plant. See, for example, U.S. Pat. No. 5,942,657. Methods for using cosuppression to inhibit the expression of endogenous genes in plants are described in Flavell, et al., (1994) Proc. Natl. Acad. Sci. USA 91:3490-3496; Jorgensen, et al., (1996) Plant Mol. Biol. 31:957-973; Johansen and Carrington (2001) Plant Physiol. 126:930-938; Broin, et al., (2002) Plant Cell 14:1417-1432; Stoutjesdijk, et al., (2002) Plant Physiol. 129:1723-1731; Yu, et al., (2003) Phytochemistry 63:753-763 and U.S. Pat. Nos. 5,034,323, 5,283,184 and 5,942,657, each of which is herein incorporated by reference. The efficiency of cosuppression may be increased by including a poly-dT region in the expression cassette at a position 3′ to the sense sequence and 5′ of the polyadenylation signal. See, U.S. Patent Application Publication Number 2002/0048814, herein incorporated by reference. Typically, such a nucleotide sequence has substantial sequence identity to the sequence of the transcript of the endogenous gene, optimally greater than about 65% sequence identity, more optimally greater than about 85% sequence identity, most optimally greater than about 95% sequence identity. See U.S. Pat. Nos. 5,283,184 and 5,034,323, herein incorporated by reference.

[0197] ii. Antisense Suppression

[0198] In some embodiments of the disclosure, inhibition of the expression of the diurnal polypeptide may be obtained by antisense suppression. For antisense suppression, the expression cassette is designed to express an RNA molecule complementary to all or part of a messenger RNA encoding the diurnal polypeptide. Over expression of the antisense RNA molecule can result in reduced expression of the native gene. Accordingly, multiple plant lines transformed with the antisense suppression expression cassette are screened to identify those that show the greatest inhibition of diurnal polypeptide expression.

[0199] The polynucleotide for use in antisense suppression may correspond to all or part of the complement of the sequence encoding the diurnal polypeptide, all or part of the complement of the 5′ and/or 3′ untranslated region of the diurnal transcript or all or part of the complement of both the coding sequence and the untranslated regions of a transcript encoding the diurnal polypeptide. In addition, the antisense polynucleotide may be fully complementary (i.e., 100% identical to the complement of the target sequence) or partially complementary (i.e., less than 100% identical to the complement of the target sequence) to the target sequence. Antisense suppression may be used to inhibit the expression of multiple proteins in the same plant. See, for example, U.S. Pat. No. 5,942,657. Furthermore, portions of the antisense nucleotides may be used to disrupt the expression of the target gene. Generally, sequences of at least 50 nucleotides, 100 nucleotides, 200 nucleotides, 300, 400, 450, 500, 550 or greater may be used. Methods for using antisense suppression to inhibit the expression of endogenous genes in plants are described, for example, in Liu, et al., (2002) Plant Physiol. 129:1732-1743 and U.S. Pat. Nos. 5,759,829 and 5,942,657, each of which is herein incorporated by reference. Efficiency of antisense suppression may be increased by including a poly-dT region in the expression cassette at a position 3′ to the antisense sequence and 5′ of the polyadenylation signal. See, U.S. Patent Application Publication Number 2002/0048814, herein incorporated by reference.

[0200] iii. Double-Stranded RNA Interference

[0201] In some embodiments of the disclosure, inhibition of the expression of a diurnal polypeptide may be obtained by double-stranded RNA (dsRNA) interference. For dsRNA interference, a sense RNA molecule like that described above for cosuppression and an antisense RNA molecule that is fully or partially complementary to the sense RNA molecule are expressed in the same cell, resulting in inhibition of the expression of the corresponding endogenous messenger RNA.

[0202] Expression of the sense and antisense molecules can be accomplished by designing the expression cassette to comprise both a sense sequence and an antisense sequence. Alternatively, separate expression cassettes may be used for the sense and antisense sequences. Multiple plant lines transformed with the dsRNA interference expression cassette or expression cassettes are then screened to identify plant lines that show the greatest inhibition of diurnal polypeptide expression. Methods for using dsRNA interference to inhibit the expression of endogenous plant genes are described in Waterhouse, et al., (1998) Proc. Natl. Acad. Sci. USA 95:13959-13964, Liu, et al., (2002) Plant Physiol. 129:1732-1743 and WO 99/49029, WO 99/53050, WO 99/61631 and WO 00/49035, each of which is herein incorporated by reference.

[0203] iv. Hairpin RNA Interference and Intron-Containing Hairpin RNA Interference

[0204] In some embodiments of the disclosure, inhibition of the expression of one or a diurnal polypeptide may be obtained by hairpin RNA (hpRNA) interference or intron-containing hairpin RNA (ihpRNA) interference. These methods are highly efficient at inhibiting the expression of endogenous genes. See, Waterhouse and Helliwell, (2003) Nat. Rev. Genet. 4:29-38 and the references cited therein.

[0205] For hpRNA interference, the expression cassette is designed to express an RNA molecule that hybridizes with itself to form a hairpin structure that comprises a single-stranded loop region and a base-paired stem. The base-paired stem region comprises a sense sequence corresponding to all or part of the endogenous messenger RNA encoding the gene whose expression is to be inhibited and an antisense sequence that is fully or partially complementary to the sense sequence. Thus, the base-paired stem region of the molecule generally determines the specificity of the RNA interference. hpRNA molecules are highly efficient at inhibiting the expression of endogenous genes, and the RNA interference they induce is inherited by subsequent generations of plants. See, for example, Chuang and Meyerowitz, (2000) Proc. Natl. Acad. Sci. USA 97:4985-4990; Stoutjesdijk, et al., (2002) Plant Physiol. 129:1723-1731 and Waterhouse and Helliwell, (2003) Nat. Rev. Genet. 4:29-38. Methods for using hpRNA interference to inhibit or silence the expression of genes are described, for example, in Chuang and Meyerowitz, (2000) Proc. Natl. Acad. Sci. USA 97:4985-4990; Stoutjesdijk, et al., (2002) Plant Physiol. 129:1723-1731; Waterhouse and Helliwell, (2003) Nat. Rev. Genet. 4:29-38; Pandolfini, et al., BMC Biotechnology 3:7 and US Patent Application Publication Number 2003/0175965, each of which is herein incorporated by reference. A transient assay for the efficiency of hpRNA constructs to silence gene expression in vivo has been described by Panstruga, et al., (2003) Mol. Biol. Rep. 30:135-140, herein incorporated by reference.

[0206] For ihpRNA, the interfering molecules have the same general structure as for hpRNA, but the RNA molecule additionally comprises an intron that is capable of being spliced in the cell in which the ihpRNA is expressed. The use of an intron minimizes the size of the loop in the hairpin RNA molecule following splicing, and this increases the efficiency of interference. See, for example, Smith, et al., (2000) Nature 407:319-320. In fact, Smith, et al., shows 100% suppression of endogenous gene expression using ihpRNA-mediated interference. Methods for using ihpRNA interference to inhibit the expression of endogenous plant genes are described, for example, in Smith, et al., (2000) Nature 407:319-320; Wesley, et al., (2001) Plant J. 27:581-590; Wang and Waterhouse, (2001) Curr. Opin. Plant Biol. 5:146-150; Waterhouse and Helliwell, (2003) Nat. Rev. Genet. 4:29-38; Helliwell and Waterhouse, (2003) Methods 30:289-295 and US Patent Application Publication Number 2003/0180945, each of which is herein incorporated by reference.

[0207] The expression cassette for hpRNA interference may also be designed such that the sense sequence and the antisense sequence do not correspond to an endogenous RNA. In this embodiment, the sense and antisense sequence flank a loop sequence that comprises a nucleotide sequence corresponding to all or part of the endogenous messenger RNA of the target gene. Thus, it is the loop region that determines the specificity of the RNA interference. See, for example, WO 02/00904, herein incorporated by reference.

[0208] v. Amplicon-Mediated Interference

[0209] Amplicon expression cassettes comprise a plant virus-derived sequence that contains all or part of the target gene but generally not all of the genes of the native virus. The viral sequences present in the transcription product of the expression cassette allow the transcription product to direct its own replication. The transcripts produced by the amplicon may be either sense or antisense relative to the target sequence (i.e., the messenger RNA for the diurnal polypeptide). Methods of using amplicons to inhibit the expression of endogenous plant genes are described, for example, in Angell and Baulcombe, (1997) EMBO J. 16:3675-3684, Angell and Baulcombe, (1999) Plant J. 20:357-362 and U.S. Pat. No. 6,646,805, each of which is herein incorporated by reference.

[0210] vi. Ribozymes

[0211] In some embodiments, the polynucleotide expressed by the expression cassette of the disclosure is catalytic RNA or has ribozyme activity specific for the messenger RNA of the diurnal polypeptide. Thus, the polynucleotide causes the degradation of the endogenous messenger RNA, resulting in reduced expression of the diurnal polypeptide. This method is described, for example, in U.S. Pat. No. 4,987,071, herein incorporated by reference.

[0212] vii. Small Interfering RNA or Micro RNA

[0213] In some embodiments of the disclosure, inhibition of the expression of a diurnal polypeptide may be obtained by RNA interference by expression of a gene encoding a micro RNA (miRNA). miRNAs are regulatory agents consisting of about 22 ribonucleotides. miRNA are highly efficient at inhibiting the expression of endogenous genes. See, for example, Javier, et al., (2003) Nature 425:257-263, herein incorporated by reference.

[0214] For miRNA interference, the expression cassette is designed to express an RNA molecule that is modeled on an endogenous miRNA gene. The miRNA gene encodes an RNA that forms a hairpin structure containing a 22-nucleotide sequence that is complementary to another endogenous gene (target sequence). For suppression of diurnal expression, the 22-nucleotide sequence is selected from a diurnal transcript sequence and contains 22 nucleotides of said diurnal sequence in sense orientation and 21 nucleotides of a corresponding antisense sequence that is complementary to the sense sequence. miRNA molecules are highly efficient at inhibiting the expression of endogenous genes and the RNA interference they induce is inherited by subsequent generations of plants.

[0215] 2. Polypeptide-Based Inhibition of Gene Expression

[0216] In one embodiment, the polynucleotide encodes a zinc finger protein that binds to a gene encoding a diurnal polypeptide, resulting in reduced expression of the gene. In particular embodiments, the zinc finger protein binds to a regulatory region of a diurnal gene. In other embodiments, the zinc finger protein binds to a messenger RNA encoding a diurnal polypeptide and prevents its translation. Methods of selecting sites for targeting by zinc finger proteins have been described, for example, in U.S. Pat. No. 6,453,242 and methods for using zinc finger proteins to inhibit the expression of genes in plants are described, for example, in US Patent Application Publication Number 2003/0037355, each of which is herein incorporated by reference.

[0217] 3. Polypeptide-Based Inhibition of Protein Activity

[0218] In some embodiments of the disclosure, the polynucleotide encodes an antibody that binds to at least one diurnal polypeptide and reduces the activity of the diurnal polypeptide. In another embodiment, the binding of the antibody results in increased turnover of the antibody-diurnal complex by cellular quality control mechanisms. The expression of antibodies in plant cells and the inhibition of molecular pathways by expression and binding of antibodies to proteins in plant cells are well known in the art. See, for example, Conrad and Sonnewald, (2003) Nature Biotech. 21:35-36, incorporated herein by reference.

[0219] 4. Gene Disruption

[0220] In some embodiments of the present disclosure, the activity of a diurnal polypeptide is reduced or eliminated by disrupting the gene encoding the diurnal polypeptide. The gene encoding the diurnal polypeptide may be disrupted by any method known in the art. For example, in one embodiment, the gene is disrupted by transposon tagging. In another embodiment, the gene is disrupted by mutagenizing plants using random or targeted mutagenesis and selecting for plants that have reduced cell number regulator activity.

[0221] i. Transposon Tagging

[0222] In one embodiment of the disclosure, transposon tagging is used to reduce or eliminate the diurnal activity of one or more diurnal polypeptide. Transposon tagging comprises inserting a transposon within an endogenous diurnal gene to reduce or eliminate expression of the diurnal polypeptide. “diurnal gene” is intended to mean the gene that encodes a diurnal polypeptide according to the disclosure.

[0223] In this embodiment, the expression of one or more diurnal polypeptide is reduced or eliminated by inserting a transposon within a regulatory region or coding region of the gene encoding the diurnal polypeptide. A transposon that is within an exon, intron, 5′ or 3′ untranslated sequence, a promoter or any other regulatory sequence of a diurnal gene may be used to reduce or eliminate the expression and/or activity of the encoded diurnal polypeptide.

[0224] Methods for the transposon tagging of specific genes in plants are well known in the art. See, for example, Maes, et al., (1999) Trends Plant Sci. 4:90-96; Dharmapuri and Sonti, (1999) FEMS Microbiol. Lett. 179:53-59; Meissner, et al., (2000) Plant J. 22:265-274; Phogat, et al., (2000) J. Biosci. 25:57-63; Walbot, (2000) Curr. Opin. Plant Biol. 2:103-107; Gai, et al., (2000) Nucleic Acids Res. 28:94-96; Fitzmaurice, et al., (1999) Genetics 153:1919-1928). In addition, the TUSC process for selecting Mu insertions in selected genes has been described in Bensen, et al., (1995) Plant Cell 7:75-84; Mena, et al., (1996) Science 274:1537-1540 and U.S. Pat. No. 5,962,764, each of which is herein incorporated by reference.

[0225] ii. Mutant Plants with Reduced Activity

[0226] Additional methods for decreasing or eliminating the expression of endogenous genes in plants are also known in the art and can be similarly applied to the instant disclosure. These methods include other forms of mutagenesis, such as ethyl methanesulfonate-induced mutagenesis, deletion mutagenesis and fast neutron deletion mutagenesis used in a reverse genetics sense (with PCR) to identify plant lines in which the endogenous gene has been deleted. For examples of these methods see, Ohshima, et al., (1998) Virology 243:472-481; Okubara, et al., (1994) Genetics 137:867-874 and Quesada, et al., (2000) Genetics 154:421-436, each of which is herein incorporated by reference. In addition, a fast and automatable method for screening for chemically induced mutations, TILLING (Targeting Induced Local Lesions In Genomes), using denaturing HPLC or selective endonuclease digestion of selected PCR products is also applicable to the instant disclosure. See, McCallum, et al., (2000) Nat. Biotechnol. 18:455-457, herein incorporated by reference.

[0227] Mutations that impact gene expression or that interfere with the function of the encoded protein are well known in the art. Insertional mutations in gene exons usually result in null-mutants. Mutations in conserved residues are particularly effective in inhibiting the cell number regulator activity of the encoded protein. Conserved residues of plant diurnal polypeptides suitable for mutagenesis with the goal to eliminate cell number regulator activity have been described. Such mutants can be isolated according to well-known procedures, and mutations in different diurnal loci can be stacked by genetic crossing. See, for example, Gruis, et al., (2002) Plant Cell 14:2863-2882.

[0228] In another embodiment of this disclosure, dominant mutants can be used to trigger RNA silencing due to gene inversion and recombination of a duplicated gene locus. See, for example, Kusaba, et al., (2003) Plant Cell 15:1455-1467.

[0229] The disclosure encompasses additional methods for reducing or eliminating the activity of one or more diurnal polypeptide. Examples of other methods for altering or mutating a genomic nucleotide sequence in a plant are known in the art and include, but are not limited to, the use of RNA:DNA vectors, RNA:DNA mutational vectors, RNA:DNA repair vectors, mixed-duplex oligonucleotides, self-complementary RNA:DNA oligonucleotides and recombinogenic oligonucleobases. Such vectors and methods of use are known in the art. See, for example, U.S. Pat. Nos. 5,565,350; 5,731,181; 5,756,325; 5,760,012; 5,795,972 and 5,871,984, each of which are herein incorporated by reference. See also, WO 98/49350, WO 99/07865, WO 99/25821 and Beetham, et al., (1999) Proc. Natl. Acad. Sci. USA 96:8774-8778, each of which is herein incorporated by reference.

[0230] iii. Modulating Plant Growth and/or Organ Development Activity

[0231] In specific methods, the level and/or activity of tissue development in a plant is increased by increasing the level or activity of the diurnal polypeptide in the plant. Methods for increasing the level and/or activity of diurnal polypeptides in a plant are discussed elsewhere herein. Briefly, such methods comprise providing a diurnal polypeptide of the disclosure to a plant and thereby increasing the level and/or activity of the diurnal polypeptide. In other embodiments, a diurnal nucleotide sequence encoding a diurnal polypeptide can be provided by introducing into the plant a polynucleotide comprising a diurnal nucleotide sequence of the disclosure, expressing the diurnal sequence, increasing the activity of the diurnal polypeptide and thereby increasing the number of tissue cells in the plant or plant part. In other embodiments, the diurnal nucleotide construct introduced into the plant is stably incorporated into the genome of the plant.

[0232] In other methods, the number of cells and biomass of a plant tissue is increased by increasing the level and/or activity of the diurnal polypeptide in the plant. Such methods are disclosed in detail elsewhere herein. In one such method, a diurnal nucleotide sequence is introduced into the plant and expression of said diurnal nucleotide sequence decreases the activity of the diurnal polypeptide and thereby increasing the plant growth and/or organ development in the plant or plant part. In other embodiments, the diurnal nucleotide construct introduced into the plant is stably incorporated into the genome of the plant.

[0233] As discussed above, one of skill will recognize the appropriate promoter to use to modulate the level/activity of a plant growth and/or organ development polynucleotide and polypeptide in the plant. Exemplary promoters for this embodiment have been disclosed elsewhere herein.

[0234] Accordingly, the present disclosure further provides plants having a modified plant growth and/or organ development when compared to the plant growth and/or organ development of a control plant tissue. In one embodiment, the plant of the disclosure has an increased level/activity of the diurnal polypeptide of the disclosure and thus has increased plant growth and/or organ development in the plant tissue. In other embodiments, the plant of the disclosure has a reduced or eliminated level of the diurnal polypeptide of the disclosure and thus has decreased plant growth and/or organ development in the plant tissue. In other embodiments, such plants have stably incorporated into their genome a nucleic acid molecule comprising a diurnal nucleotide sequence of the disclosure operably linked to a promoter that drives expression in the plant cell.

[0235] iv. Modulating Root Development

[0236] Methods for modulating root development in a plant are provided. By “modulating root development” is intended any alteration in the development of the plant root when compared to a control plant. Such alterations in root development include, but are not limited to, alterations in the growth rate of the primary root, the fresh root weight, the extent of lateral and adventitious root formation, the vasculature system, meristem development or radial expansion.

[0237] Methods for modulating root development in a plant are provided. The methods comprise modulating the level and/or activity of the diurnal polypeptide in the plant. In one method, a diurnal sequence of the disclosure is provided to the plant. In another method, the diurnal nucleotide sequence is provided by introducing into the plant a polynucleotide comprising a diurnal nucleotide sequence of the disclosure, expressing the diurnal sequence and thereby modifying root development. In still other methods, the diurnal nucleotide construct introduced into the plant is stably incorporated into the genome of the plant.

[0238] In other methods, root development is modulated by altering the level or activity of the diurnal polypeptide in the plant. An increase in diurnal activity can result in at least one or more of the following alterations to root development, including, but not limited to, larger root meristems, increased in root growth, enhanced radial expansion, an enhanced vasculature system, increased root branching, more adventitious roots and/or an increase in fresh root weight when compared to a control plant.

[0239] As used herein, “root growth” encompasses all aspects of growth of the different parts that make up the root system at different stages of its development in both monocotyledonous and dicotyledonous plants. It is to be understood that enhanced root growth can result from enhanced growth of one or more of its parts including the primary root, lateral roots, adventitious roots, etc.

[0240] Methods of measuring such developmental alterations in the root system are known in the art. See, for example, US Patent Application Publication Number 2003/0074698 and Werner, et al., (2001) PNAS 18:10487-10492, both of which are herein incorporated by reference.

[0241] As discussed above, one of skill will recognize the appropriate promoter to use to modulate root development in the plant. Exemplary promoters for this embodiment include constitutive promoters and root-preferred promoters. Exemplary root-preferred promoters have been disclosed elsewhere herein.

[0242] Stimulating root growth and increasing root mass by increasing the activity and/or level of the diurnal polypeptide also finds use in improving the standability of a plant. The term “resistance to lodging” or “standability” refers to the ability of a plant to fix itself to the soil. For plants with an erect or semi-erect growth habit, this term also refers to the ability to maintain an upright position under adverse (environmental) conditions. This trait relates to the size, depth and morphology of the root system. In addition, stimulating root growth and increasing root mass by increasing the level and/or activity of the diurnal polypeptide also finds use in promoting in vitro propagation of explants.

[0243] Furthermore, higher root biomass production due to an increased level and/or activity of diurnal activity has a direct effect on the yield and an indirect effect of production of compounds produced by root cells or transgenic root cells or cell cultures of said transgenic root cells. One example of an interesting compound produced in root cultures is shikonin, the yield of which can be advantageously enhanced by said methods.

[0244] Accordingly, the present disclosure further provides plants having modulated root development when compared to the root development of a control plant. In some embodiments, the plant of the disclosure has an increased level/activity of the diurnal polypeptide of the disclosure and has enhanced root growth and/or root biomass. In other embodiments, such plants have stably incorporated into their genome a nucleic acid molecule comprising a diurnal nucleotide sequence of the disclosure operably linked to a promoter that drives expression in the plant cell.

[0245] v. Modulating Shoot and Leaf Development

[0246] Methods are also provided for modulating shoot and leaf development in a plant. By “modulating shoot and/or leaf development” is intended any alteration in the development of the plant shoot and/or leaf. Such alterations in shoot and/or leaf development include, but are not limited to, alterations in shoot meristem development, in leaf number, leaf size, leaf and stem vasculature, internode length and leaf senescence. As used herein, “leaf development” and “shoot development” encompasses all aspects of growth of the different parts that make up the leaf system and the shoot system, respectively, at different stages of their development, both in monocotyledonous and dicotyledonous plants. Methods for measuring such developmental alterations in the shoot and leaf system are known in the art. See, for example, Werner, et al., (2001) PNAS 98:10487-10492 and US Patent Application Publication Number 2003/0074698, each of which is herein incorporated by reference.

[0247] The method for modulating shoot and/or leaf development in a plant comprises modulating the activity and/or level of a diurnal polypeptide of the disclosure. In one embodiment, a diurnal sequence of the disclosure is provided. In other embodiments, the diurnal nucleotide sequence can be provided by introducing into the plant a polynucleotide comprising a diurnal nucleotide sequence of the disclosure, expressing the diurnal sequence and thereby modifying shoot and/or leaf development. In other embodiments, the diurnal nucleotide construct introduced into the plant is stably incorporated into the genome of the plant.

[0248] In specific embodiments, shoot or leaf development is modulated by decreasing the level and/or activity of the diurnal polypeptide in the plant. A decrease in diurnal activity can result in at least one or more of the following alterations in shoot and/or leaf development, including, but not limited to, reduced leaf number, reduced leaf surface, reduced vascular, shorter internodes and stunted growth and retarded leaf senescence, when compared to a control plant.

[0249] As discussed above, one of skill will recognize the appropriate promoter to use to modulate shoot and leaf development of the plant. Exemplary promoters for this embodiment include constitutive promoters, shoot-preferred promoters, shoot meristem-preferred promoters and leaf-preferred promoters. Exemplary promoters have been disclosed elsewhere herein.

[0250] Decreasing diurnal activity and/or level in a plant results in shorter internodes and stunted growth. Thus, the methods of the disclosure find use in producing dwarf plants. In addition, as discussed above, modulation of diurnal activity in the plant modulates both root and shoot growth. Thus, the present disclosure further provides methods for altering the root/shoot ratio. Shoot or leaf development can further be modulated by decreasing the level and/or activity of the diurnal polypeptide in the plant.

[0251] Accordingly, the present disclosure further provides plants having modulated shoot and/or leaf development when compared to a control plant. In some embodiments, the plant of the disclosure has an increased level/activity of the diurnal polypeptide of the disclosure, altering the shoot and/or leaf development. Such alterations include, but are not limited to, increased leaf number, increased leaf surface, increased vascularity, longer internodes and increased plant stature, as well as alterations in leaf senescence, as compared to a control plant. In other embodiments, the plant of the disclosure has a decreased level/activity of the diurnal polypeptide of the disclosure.

[0252] vi Modulating Reproductive Tissue Development

[0253] Methods for modulating reproductive tissue development are provided. In one embodiment, methods are provided to modulate floral development in a plant. By “modulating floral development” is intended any alteration in a structure of a plant's reproductive tissue as compared to a control plant in which the activity or level of the diurnal polypeptide has not been modulated. “Modulating floral development” further includes any alteration in the timing of the development of a plant's reproductive tissue (i.e., a delayed or an accelerated timing of floral development) when compared to a control plant in which the activity or level of the diurnal polypeptide has not been modulated. Macroscopic alterations may include changes in size, shape, number or location of reproductive organs, the developmental time period that these structures form or the ability to maintain or proceed through the flowering process in times of environmental stress. Microscopic alterations may include changes to the types or shapes of cells that make up the reproductive organs.

[0254] The method for modulating floral development in a plant comprises modulating diurnal activity in a plant. In one method, a diurnal sequence of the disclosure is provided. A diurnal nucleotide sequence can be provided by introducing into the plant a polynucleotide comprising a diurnal nucleotide sequence of the disclosure, expressing the diurnal sequence and thereby modifying floral development. In other embodiments, the diurnal nucleotide construct introduced into the plant is stably incorporated into the genome of the plant.

[0255] In specific methods, floral development is modulated by decreasing the level or activity of the diurnal polypeptide in the plant. A decrease in diurnal activity can result in at least one or more of the following alterations in floral development, including, but not limited to, retarded flowering, reduced number of flowers, partial male sterility and reduced seed set, when compared to a control plant. Inducing delayed flowering or inhibiting flowering can be used to enhance yield in forage crops such as alfalfa. Methods for measuring such developmental alterations in floral development are known in the art. See, for example, Mouradov, et al., (2002) The Plant Cell S111-S130, herein incorporated by reference.

[0256] As discussed above, one of skill will recognize the appropriate promoter to use to modulate floral development of the plant. Exemplary promoters for this embodiment include constitutive promoters, inducible promoters, shoot-preferred promoters and inflorescence-preferred promoters.

[0257] In other methods, floral development is modulated by increasing the level and/or activity of the diurnal sequence of the disclosure. Such methods can comprise introducing a diurnal nucleotide sequence into the plant and increasing the activity of the diurnal polypeptide. In other methods, the diurnal nucleotide construct introduced into the plant is stably incorporated into the genome of the plant. Increasing expression of the diurnal sequence of the disclosure can modulate floral development during periods of stress. Such methods are described elsewhere herein. Accordingly, the present disclosure further provides plants having modulated floral development when compared to the floral development of a control plant. Compositions include plants having an increased level/activity of the diurnal polypeptide of the disclosure and having an altered floral development. Compositions also include plants having an increased level/activity of the diurnal polypeptide of the disclosure wherein the plant maintains or proceeds through the flowering process in times of stress.

[0258] Methods are also provided for the use of the diurnal sequences of the disclosure to increase seed size and/or weight. The method comprises increasing the activity of the diurnal sequences in a plant or plant part, such as the seed. An increase in seed size and/or weight comprises an increased size or weight of the seed and/or an increase in the size or weight of one or more seed part including, for example, the embryo, endosperm, seed coat, aleurone or cotyledon.

[0259] As discussed above, one of skill will recognize the appropriate promoter to use to increase seed size and/or seed weight. Exemplary promoters of this embodiment include constitutive promoters, inducible promoters, seed-preferred promoters, embryo-preferred promoters and endosperm-preferred promoters.

[0260] The method for decreasing seed size and/or seed weight in a plant comprises decreasing diurnal activity in the plant. In one embodiment, the diurnal nucleotide sequence can be provided by introducing into the plant a polynucleotide comprising a diurnal nucleotide sequence of the disclosure, expressing the diurnal sequence and thereby decreasing seed weight and/or size. In other embodiments, the diurnal nucleotide construct introduced into the plant is stably incorporated into the genome of the plant.

[0261] It is further recognized that increasing seed size and/or weight can also be accompanied by an increase in the speed of growth of seedlings or an increase in early vigor. As used herein, the term “early vigor” refers to the ability of a plant to grow rapidly during early development and relates to the successful establishment, after germination, of a well-developed root system and a well-developed photosynthetic apparatus. In addition, an increase in seed size and/or weight can also result in an increase in plant yield when compared to a control.

[0262] Accordingly, the present disclosure further provides plants having an increased seed weight and/or seed size when compared to a control plant. In other embodiments, plants having an increased vigor and plant yield are also provided. In some embodiments, the plant of the disclosure has an increased level/activity of the diurnal polypeptide of the disclosure and has an increased seed weight and/or seed size. In other embodiments, such plants have stably incorporated into their genome a nucleic acid molecule comprising a diurnal nucleotide sequence of the disclosure operably linked to a promoter that drives expression in the plant cell.

[0263] vii. Method of Use for Diurnal Promoter Polynucleotides

[0264] The polynucleotides comprising the diurnal promoters disclosed in the present disclosure, as well as variants and fragments thereof, are useful in the genetic manipulation of any host cell, preferably plant cell, when assembled with a DNA construct such that the promoter sequence is operably linked to a nucleotide sequence comprising a polynucleotide of interest. In this manner, the diurnal promoter polynucleotides of the disclosure are provided in expression cassettes along with a polynucleotide sequence of interest for expression in the host cell of interest. As discussed in the Examples section of the disclosure, the diurnal promoter sequences of the disclosure are expressed in a variety of tissues and thus the promoter sequences can find use in regulating the temporal and/or the spatial expression of polynucleotides of interest.

[0265] Synthetic hybrid promoter regions are known in the art. Such regions comprise upstream promoter elements of one polynucleotide operably linked to the promoter element of another polynucleotide. In an embodiment of the disclosure, heterologous sequence expression is controlled by a synthetic hybrid promoter comprising the diurnal promoter sequences of the disclosure, or a variant or fragment thereof, operably linked to upstream promoter element(s) from a heterologous promoter. Upstream promoter elements that are involved in the plant defense system have been identified and may be used to generate a synthetic promoter. See, for example, Rushton, et al., (1998) Curr. Opin. Plant Biol. 1:311-315. Alternatively, a synthetic diurnal promoter sequence may comprise duplications of the upstream promoter elements found within the diurnal promoter sequences.

[0266] It is recognized that the promoter sequence of the disclosure may be used with its native diurnal coding sequences. A DNA construct comprising the diurnal promoter operably linked with its native diurnal gene may be used to transform any plant of interest to bring about a desired phenotypic change, such as modulating cell number, modulating root, shoot, leaf, floral and embryo development, stress tolerance and any other phenotype described elsewhere herein.

[0267] The promoter nucleotide sequences and methods disclosed herein are useful in regulating expression of any heterologous nucleotide sequence in a host plant in order to vary the phenotype of a plant. Various changes in phenotype are of interest including modifying the fatty acid composition in a plant, altering the amino acid content of a plant, altering a plant's pathogen defense mechanism, and the like. These results can be achieved by providing expression of heterologous products or increased expression of endogenous products in plants. Alternatively, the results can be achieved by providing for a reduction of expression of one or more endogenous products, particularly enzymes or cofactors in the plant. These changes result in a change in phenotype of the transformed plant.

[0268] Genes of interest are reflective of the commercial markets and interests of those involved in the development of the crop. Crops and markets of interest change, and as developing nations open up world markets, new crops and technologies will emerge also. In addition, as our understanding of agronomic traits and characteristics such as yield and heterosis increase, the choice of genes for transformation will change accordingly. General categories of genes of interest include, for example, those genes involved in information, such as zinc fingers, those involved in communication, such as kinases and those involved in housekeeping, such as heat shock proteins. More specific categories of transgenes, for example, include genes encoding important traits for agronomics, insect resistance, disease resistance, herbicide resistance, sterility, grain characteristics and commercial products. Genes of interest include, generally, those involved in oil, starch, carbohydrate or nutrient metabolism as well as those affecting kernel size, sucrose loading, and the like.

[0269] In certain embodiments the nucleic acid sequences of the present disclosure can be used in combination (“stacked”) with other polynucleotide sequences of interest in order to create plants with a desired phenotype. The combinations generated can include multiple copies of any one or more of the polynucleotides of interest. The polynucleotides of the present disclosure may be stacked with any gene or combination of genes to produce plants with a variety of desired trait combinations, including but not limited to traits desirable for animal feed such as high oil genes (e.g., U.S. Pat. No. 6,232,529); balanced amino acids (e.g., hordothionins (U.S. Pat. Nos. 5,990,389; 5,885,801; 5,885,802 and 5,703,409); barley high lysine (Williamson, et al., (1987) Eur. J. Biochem. 165:99-106 and WO 98/20122) and high methionine proteins (Pedersen, et al., (1986) J. Biol. Chem. 261:6279; Kirihara, et al., (1988) Gene 71:359 and Musumura, et al., (1989) Plant Mol. Biol. 12:123)); increased digestibility (e.g., modified storage proteins (U.S. patent application Ser. No. 10/053,410, filed Nov. 7, 2001) and thioredoxins (U.S. patent application Ser. No. 10/005,429, filed Dec. 3, 2001)), the disclosures of which are herein incorporated by reference. The polynucleotides of the present disclosure can also be stacked with traits desirable for insect, disease or herbicide resistance (e.g., Bacillus thuringiensis toxic proteins (U.S. Pat. Nos. 5,366,892; 5,747,450; 5,737,514; 5723,756; 5,593,881; Geiser, et al., (1986) Gene 48:109); lectins (Van Damme, et al., (1994) Plant Mol. Biol. 24:825); fumonisin detoxification genes (U.S. Pat. No. 5,792,931); avirulence and disease resistance genes (Jones, et al., (1994) Science 266:789; Martin, et al., (1993) Science 262:1432; Mindrinos, et al., (1994) Cell 78:1089); acetolactate synthase (ALS) mutants that lead to herbicide resistance such as the S4 and/or Hra mutations; inhibitors of glutamine synthase such as phosphinothricin or basta (e.g., bar gene) and glyphosate resistance (EPSPS gene)) and traits desirable for processing or process products such as high oil (e.g., U.S. Pat. No. 6,232,529); modified oils (e.g., fatty acid desaturase genes (U.S. Pat. No. 5,952,544; WO 94/11516)); modified starches (e.g., ADPG pyrophosphorylases (AGPase), starch synthases (SS), starch branching enzymes (SBE) and starch debranching enzymes (SDBE)) and polymers or bioplastics (e.g., U.S. Pat. No. 5,602,321; beta-ketothiolase, polyhydroxybutyrate synthase, and acetoacetyl-CoA reductase (Schubert, et al., (1988) J. Bacteriol. 170:5837-5847) facilitate expression of polyhydroxyalkanoates (PHAs)), the disclosures of which are herein incorporated by reference. One could also combine the polynucleotides of the present disclosure with polynucleotides affecting agronomic traits such as male sterility (e.g., see, U.S. Pat. No. 5,583,210), stalk strength, flowering time or transformation technology traits such as cell cycle regulation or gene targeting (e.g., WO 99/61619; WO 00/17364; WO 99/25821), the disclosures of which are herein incorporated by reference.

[0270] In one embodiment, sequences of interest improve plant growth and/or crop yields. For example, sequences of interest include agronomically important genes that result in improved primary or lateral root systems. Such genes include, but are not limited to, nutrient/water transporters and growth induces. Examples of such genes, include but are not limited to, maize plasma membrane H⁺-ATPase (MHA2) (Frias, et al., (1996) Plant Cell 8:1533-44); AKT1, a component of the potassium uptake apparatus in Arabidopsis, (Spalding, et al., (1999) J Gen Physiol 113:909-18); RML genes which activate cell division cycle in the root apical cells (Cheng, et al., (1995) Plant Physiol 108:881); maize glutamine synthetase genes (Sukanya, et al., (1994) Plant Mol Biol 26:1935-46) and hemoglobin (Duff, et al., (1997) J. Biol. Chem. 27:16749-16752, Arredondo-Peter, et al., (1997) Plant Physiol. 115:1259-1266; Arredondo-Peter, et al., (1997) Plant Physiol 114:493-500 and references sited therein). The sequence of interest may also be useful in expressing antisense nucleotide sequences of genes that that negatively affects root development.

[0271] Additional, agronomically important traits such as oil, starch and protein content can be genetically altered in addition to using traditional breeding methods. Modifications include increasing content of oleic acid, saturated and unsaturated oils, increasing levels of lysine and sulfur, providing essential amino acids and also modification of starch. Hordothionin protein modifications are described in U.S. Pat. Nos. 5,703,049, 5,885,801, 5,885,802 and 5,990,389, herein incorporated by reference. Another example is lysine and/or sulfur rich seed protein encoded by the soybean 2S albumin described in U.S. Pat. No. 5,850,016 and the chymotrypsin inhibitor from barley, described in Williamson, et al., (1987) Eur. J. Biochem. 165:99-106, the disclosures of which are herein incorporated by reference.

[0272] Derivatives of the coding sequences can be made by site-directed mutagenesis to increase the level of preselected amino acids in the encoded polypeptide. For example, the gene encoding the barley high lysine polypeptide (BHL) is derived from barley chymotrypsin inhibitor, U.S. patent application Ser. No. 08/740,682, filed Nov. 1, 1996 and WO 98/20133, the disclosures of which are herein incorporated by reference. Other proteins include methionine-rich plant proteins such as from sunflower seed (Lilley, et al., (1989) Proceedings of the World Congress on Vegetable Protein Utilization in Human Foods and Animal Feedstuffs, ed. Applewhite (American Oil Chemists Society, Champaign, Ill.), pp. 497-502, herein incorporated by reference); corn (Pedersen, et al., (1986) J. Biol. Chem. 261:6279; Kirihara, et al., (1988) Gene 71:359, both of which are herein incorporated by reference) and rice (Musumura, et al., (1989) Plant Mol. Biol. 12:123, herein incorporated by reference). Other agronomically important genes encode latex, Floury 2, growth factors, seed storage factors and transcription factors.

[0273] Insect resistance genes may encode resistance to pests that have great yield drag such as rootworm, cutworm, European Corn Borer, and the like. Such genes include, for example, Bacillus thuringiensis toxic protein genes (U.S. Pat. Nos. 5,366,892; 5,747,450; 5,736,514; 5,723,756; 5,593,881 and Geiser, et al., (1986) Gene 48:109), and the like.

[0274] Genes encoding disease resistance traits include detoxification genes, such as against fumonosin (U.S. Pat. No. 5,792,931); avirulence (avr) and disease resistance (R) genes (Jones, et al., (1994) Science 266:789; Martin, et al., (1993) Science 262:1432 and Mindrinos, et al., (1994) Cell 78:1089), and the like.

[0275] Herbicide resistance traits may include genes coding for resistance to herbicides that act to inhibit the action of acetolactate synthase (ALS), in particular the sulfonylurea-type herbicides (e.g., the acetolactate synthase (ALS) gene containing mutations leading to such resistance, in particular the S4 and/or Hra mutations), genes coding for resistance to herbicides that act to inhibit action of glutamine synthase, such as phosphinothricin or basta (e.g., the bar gene) or other such genes known in the art. The bar gene encodes resistance to the herbicide basta, the nptII gene encodes resistance to the antibiotics kanamycin and geneticin and the ALS-gene mutants encode resistance to the herbicide chlorsulfuron.

[0276] Sterility genes can also be encoded in an expression cassette and provide an alternative to physical detasseling. Examples of genes used in such ways include male tissue-preferred genes and genes with male sterility phenotypes such as QM, described in U.S. Pat. No. 5,583,210. Other genes include kinases and those encoding compounds toxic to either male or female gametophytic development.

[0277] The quality of grain is reflected in traits such as levels and types of oils, saturated and unsaturated, quality and quantity of essential amino acids, and levels of cellulose. In corn, modified hordothionin proteins are described in U.S. Pat. Nos. 5,703,049, 5,885,801, 5,885,802 and 5,990,389.

[0278] Commercial traits can also be encoded on a gene or genes that could increase for example, starch for ethanol production or provide expression of proteins. Another important commercial use of transformed plants is the production of polymers and bioplastics such as described in U.S. Pat. No. 5,602,321. Genes such as 13-Ketothiolase, PHBase (polyhydroxyburyrate synthase) and acetoacetyl-CoA reductase (see, Schubert, et al., (1988) J. Bacteriol. 170:5837-5847) facilitate expression of polyhyroxyalkanoates (PHAs).

[0279] Exogenous products include plant enzymes and products as well as those from other sources including procaryotes and other eukaryotes. Such products include enzymes, cofactors, hormones, and the like. The level of proteins, particularly modified proteins having improved amino acid distribution to improve the nutrient value of the plant, can be increased. This is achieved by the expression of such proteins having enhanced amino acid content.

[0280] viii. Identification of Additional Cis-Acting Elements

[0281] Additional cis-elements for the diurnal promoters disclosed herein can be identified by a number of standard techniques, including for example, nucleotide deletion analysis, i.e., deleting one or more nucleotides from the 5′ end or internal to a promoter and assaying for regulatory activity, DNA binding protein analysis using DNase I footprinting, methylation interference, electrophoresis mobility-shift assays, in vivo genomic footprinting by ligation-mediated PCR, and other conventional assays or by DNA sequence similarity analysis with other known cis-element motifs by conventional DNA sequence comparison methods and by statistical methods such as hidden Markov model (HMM). cis-elements can be further analyzed by mutational analysis of one or more nucleotides or by other conventional methods.

[0282] ix. Chimeric Promoters

[0283] Chimeric promoters that combine one or more cis-elements are known (see, Venter, et al., (2008), Trends in Plant Science, 12(3):118-124). Chimeric promoters that contain cis-elements from the promoters disclosed herein along with their flanking sequences can be engineered into other promoters that are for example, tissue specific. For example, a chimeric promoter may be generated by fusing a first promoter fragment containing the activator (diurnal) cis-element from one promoter to a second promoter fragment containing the activator (tissue-specific) cis-element from another promoter; the resultant chimeric promoter may increase gene expression of the linked transcribable polynucleotide molecule in both diurnal and tissue specific manner. Regulatory elements disclosed herein are used to engineer chimeric promoters, for example, by placing such an element upstream of a minimal promoter.

[0284] This disclosure can be better understood by reference to the following non-limiting examples. It will be appreciated by those skilled in the art that other embodiments of the disclosure may be practiced without departing from the spirit and the scope of the disclosure as herein disclosed and claimed.

### EXAMPLES

### Example 1

### Diurnal Studies in Maize

[0285] Maize plants (B73 genotype) were grown under field conditions and sampled at the reproductive V14-15 stage. Light conditions at sampling were approximately 14.75 hours of sunlight according to records of US Naval Observatory (Materials and Methods). Starting at sunrise on day 1, the top leaves and immature ears were sampled at 4 hour time intervals over three consecutive days. RNA profiling was performed on custom Agilent Maize arrays designed to interrogate global gene expression patterns across circa 105K probes. Samples for the Illumina Digital Gene Expression (DGE) platform were collected with 3 replicate pools of 3 plants every 4 hours over a 1 day period. The three samples were then split into three groups for analysis.

[0286] The GeneTS methodology was applied to the data to determine periodicity (Wichert, et al., (2004) Bioinformatics 20:5-20). This method first creates a periodogram for Fourier frequencies. Significant Fourier frequencies are then assessed for significance via Fisher's g-statistic. Given the experimental design, this method shows greater power in the detection of circadian rhythmicity than other commonly used methods (Hughes, et al., (2007) Cold Spring Harb Symp Quant Biol 72:381-386; Hughes, et al., (2009) PLoS Genet. 5:e1000442). The significance values from Fisher's G-Test were then corrected for multiple measures comparisons via conversion to q-values to assess False Discovery Rates (Storey and Tibshirani, (2003) Proc Natl Acad Sci USA 100:9440-9445). Diurnally regulated transcripts were determined as those having significant expression at least once per day and also that were significant at a FDR rate of 10%.

### Leaf Diurnal MicroArray Analysis

[0287] Diurnal rhythms of gene expression were readily detectable within the photosynthetic leaf tissue. Of the 44,187 probes with detectable expression, 10,037 or 22.7% were identified as cycling by the GeneTS algorithm. This proportion of cycling transcripts is in line with the proportion reported for Arabidopsis (Hazen, et al., (2009) Genome Biol 10:R17). Significantly cycling transcripts have a median period of 24.1 hours, as would be expected for natural conditions. Amplitudes of cycling transcripts are robust, with a median peak/trough ratio-5-fold, with many showing peak/trough ratios of higher than 20-fold. The peak expression for these cycling transcripts exhibits a broad distribution, peaking at all phases of the day.

### Ear Diurnal MicroArray Analysis

[0288] In contrast to the leaf results, very few transcripts within the developing ear exhibited diurnal rhythms. Only 149 of the 38,445 expressed transcript probes (1.7%) were positively identified as cycling. Despite the low numbers of cycling transcripts, there is early-evening enrichment, with roughly half of the cycling transcripts peaking in this phase. Of the 149 transcripts, 100 (67.1%) were also diurnally cycling in the leaf tissue. Among those that cycled in both leaf and ear tissues, the amplitudes of the rhythms is severely attenuated in the developing ear. This list was reduced to 45 putative ear cycling genes after consolidation of redundant probes and more thorough gene annotation (FIG. 3). Many of these genes appeared to be maize homologues of well-described Arabidopsis oscillators CCA1/LHY, TOC1, PRR7/3, GI, ZTL (ZEITLUPE, known as Adagio-like protein 3 in rice). The maize ear tissue core oscillator thus appears to be intact, but is apparently decoupled from the majority of its transcriptional output systems.

[0289] A few output genes are nonetheless found in the set of genes that cycle in ears. The list of robust cycling transcripts include up to 13 maize light-harvesting CAB transcripts (chlorophyll a-b binding protein), which is a subset of the greater maize CAB gene family. The CONSTANS-like (ZmCO-like) gene, mapped to chromosome 1, cycles in ears and leaves with a peak of expression at early evening (6 PM). However it is a different CO homologue that have been previously identified as conz1 on chromosome 9 (Miller, et al., (2008) Planta 227:1377-1388). Robust cycling was detected for the MYB-like transcription factor (ZmMyb.L) which peaked at dawn (6 AM). This gene is a homologue of REVEILLE1, a Myb-transcription factor integrating the circadian clock and auxin pathway in Arabidopsis (Rawat, et al., (2009)). Two ear-specific genes have intriguing putative functions, a zinc finger protein (ZmZF-5) peaking at 10 AM and an osmotic stress/abscisic acid-activated serine/threonine-protein kinase (ZmSAPK9) peaking at 6 PM. Among other cycling genes there are three encoding transporters, two heat shock proteins, several enzymes and hypothetical proteins.

### Digital Gene Expression Analysis

[0290] Independent samples were taken specifically for the Illumina DGE expression platform (Illumina, Inc., 9885 Towne Centre Drive, San Diego, Calif. 92121 USA), were also analyzed for rhythmicity. This represents the first NexGen-style deep sequencing effort for determining rhythmic diurnal expression patterns. Three replicates from each of six time points (ZT0, ZT4, ZT8, ZT12, ZT16 and ZT20) were sequenced off anchor points for two restriction enzyme cut sites, DPNII and NLAIII. Each multiplexed sample was run in separate flow cell lanes. Output sequences were assessed for quality and aligned against the Dana Farber Gene Index Maize 19.0 (found on world wide web at compbio.dfci.harvard.edu/tgi/). A total of 4.7×10⁹ base pairs passed all quality control and alignment measures from the sequencing runs, which is approximately 1.3×10⁸ bp per lane. Over 1.89×10⁸ tags were advanced for gene expression analysis of rhythmic behavior, or roughly 5.25 million tags per sample. The three replicates were artificially split into three consecutive days. The data was then assessed for periodicity in the same manner as the microarray data. This data is chiefly used here as independent confirmation for those cycling transcripts identified through the more statistically robust microarray strategy, and therefore it is not here used as a stand-alone discovery experiment.

[0291] The results show broad concordance with the Agilent analysis. In the leaf tissue, 2559 transcripts were identified as cycling in the leaf tissue. All of the core components identified as cycling by Agilent were also determined to be cycling under Illumina. There were 1378 transcripts that were identified as cycling by both technologies. As these transcripts were independently found by each distinct profiling platform, these transcripts serve as the most confident base set for cycling transcripts in photosynthetic (leaf) tissues of maize.

[0292] The developing ear Illumina profiling showed over twice as many cycling transcripts than Agilent, with 362 showing significant rhythms. Yet, while the number of cycling genes in developing ear increased, it remained small in comparison to the leaf photosynthetic tissue. Though the concordance between these distinct technologies was lower, 48 transcripts were still identified from ears as cycling in both platforms. Of these 48 transcripts that did cycle, 23 were identified by both the Agilent and Illumina technologies and in both leaf and ear tissues. Of the remaining 25, 24 were identified as cycling in three out of the four possible tests (Leaf Agilent, Leaf Illumina, Ear Agilent and Ear Illumina). These independent results confirm that the core oscillator is functioning in ear tissue.

### Diurnal Expression Analysis

[0293] The diurnal transcriptional profiles of maize are robust and similar to that of the model plant Arabidopsis in independent biological tissues and technical platforms. Results from the light receiving photosynthetic leaf tissue identified diurnal rhythms for as high as 22.7% (10K/44K probes) of the expressed transcripts using the Agilent technology. Using two independent transcriptome-wide analysis platforms, Agilent Microarrays and Illumina Tag Sequencing, compensates for the biases inherent to either technology and reveals a minimal core high confidence set of 1400 transcripts that are diurnally regulated.

[0294] In the non-photosynthetic developing ear, diurnal rhythms were not a significant contributor to the transcriptional program. Just 45 genes were identified as cycling either in ears only or in both ears and leaves. Among them 13 CAB (chlorophyll A/B transcripts) were found, now well-established markers of diurnal expression patterns in plants (Millar and Kay, (1991) Plant Cell 3:541-550). However, their amplitudes were severely attenuated in ears as compared to leaves. Eleven orthologs of the core oscillator system appear in this cross-tissue leaf-ear set. Therefore it appears that the core oscillator is active in ears. The core oscillator of plants has been described as an interlocking three or four loop process (Harmer, (2009); Ueda, (2006) Mol Syst Biol 2:60). The results indicate that the central feedback loop, consisting of ZmCCA1/ZmLHY and ZmTOC1a,b is conserved in maize. This loop shows extreme amplitude waves in leaf tissue and likely serves as the main driver for transcriptional output. In the ear tissue, the amplitude of these waves are attenuated, reduced 83% and 94% respectively, mainly by a reduction in peak transcriptional levels. The reduced height of the ear tissue wave pattern strongly points to persistent diurnal cycling but at decreased amplitude. It does not appear to be a de-synchronization of the diurnal pattern that might spread offsets in cycling patterns so as to mute or obscure the peak-trough wave pattern. If the ZmCCA1/ZmTOC1 loop does serve as the central zeitgeber, with its attenuated wave pattern, its relative contribution to signaling diurnal output genes should be severely reduced. The two exterior loops, containing such genes as ZmPRR73/ZmPRR37, gigz1/gigz2 and ZmZTLa/ZmZTLb also show significant reductions in wave amplitude.

[0295] One explanation for the decoupling of the core machinery from the output pathways in ears could be attributed to the low light intensity penetrating developing ears through the husk leaves (bracts) that are wrapped around ears. Transcriptional reinforcement of the diurnal expression pattern may occur via light sensing proteins such as the phytochromes and cryptochromes and therefore this reinforcement would be reduced accordingly in ears experiencing a relative absence of light. As shown in Arabidopsis, the core oscillator clock genes, such as CCA1 and LHY, are activated by light and mediate activation of the output CAB genes (Wang, et al., (1997)). The low amplitude of the core oscillators may therefore not generate enough protein to trigger transcription of the output pathways or do so feebly. A few output genes whose promoters might be sensitive to lower levels of the core oscillator products are activated but the overall transcriptional outputs has been effectively decoupled.

[0296] In ears there are few cycling genes that may be proximal translational nodes connecting the core oscillator to the output pathways. One of them is ZmMyb.L which has a peak of expression at 6 AM in leaves and ears. The ZmMYB.L protein shows a high degree of identity to the MYB domain of the morning phase genes CCA/LHY of both Arabidopsis and maize, extending even to including the distinctive SHAQKYFF protein motif. ZmMyb.L might have the orthologous function of Arabidopsis REVEILLE1, that integrates the circadian clock with the auxin pathway (Rawat, (2009)).

[0297] Microarray analysis of Arabidopsis root and shoot tissue grown has shown that a simplified version of the core oscillator does cycle in root non-photosynthetic tissue (James, et al., (2008) Science 322:1832-1835). According to that microarray expression study, 6518 transcripts are identified as cycling in shoot tissue compared with 335 in the root tissue. Those results largely agree with the hereby disclosed findings; that is, in largely non-photosynthetic tissues, whether root or ear, many components of the core oscillator function, but their transcriptional output is largely attenuated.

### Diurnal Physiological Functions

[0298] Diurnal gene expression rhythms were studied in order to better understand the scope of diurnally regulated biology at the molecular level that could lead to opportunities to improve crop plant performance. (FIG. 5) These results reveal many aspects of the maize diurnal mechanism, from core clock genes, signaling and downstream effecter genes. The diurnal swing in maize leaf gene expression is pervasive, with thousands of genes and their attendant functions cycling in a diurnal tide. The apparent succession of physiological roles across the span of the day is intriguing and suggests specifically staged control of expression, but this may also be a natural progression of physiological events unfolding in response to both proximal and distal events in the diurnal rhythm. It is acknowledged that finer timepoint resolution will yield both more diurnally regulated transcripts, and also better delineate the succession of functional focusing across the day. This genome-wide diurnal profiling survey, the first for maize, coupled with assignments to over 1700 functional terms, has uncovered a durable outline of the succession of functional events in the day. It is clear that diurnal rhythms are complex and deeply woven into the biology of the cell and presumably it is adaptive to have coincident or coordinated expression of cellular machinery.

[0299] The presence of the bimodal functional enrichment pattern in the morning and afternoon/evening is intriguing and almost certainly reflects a fundamental activity in the plants daily regimen. More genes are peaking at the 10 AM and 6 PM timepoints and this will by itself cause more functional categories to which these genes belong to also peak at those times, resulting in this bimodal functional pattern. Although individual diurnally regulated genes are peaking at just one time during the day, the fact that the functional categories are bimodal, means that different genes under those functional umbrellas are peaking at different times. A possible connection to the recently described ‘solar clock’ that is calibrated to mid-day can now also be considered (Yeang, (2009) Bioessays 31:1211-1218). These morning and evening peaks could signify communication occurring between diurnally regulated genes and solar clock-regulated genes.

[0300] The diurnal patterns are strong in leaves, but feeble in developing ears. Developing ears are also the main sink for the photosynthetic source organs experiencing the throws of diurnal swings. Even if immature ears do not themselves have a marked internal diurnal drive, received from source organs might be expected to occur, as via waves of mobile signals and fixed carbon, to stir diurnal transcriptional action of some genes from outside. Yet, this is apparently not observed. Considering the times at which the few ear diurnally regulated genes peak during the day the functional enrichment suggests signal transduction and transcription in the morning, photosynthesis in the afternoon and core oscillator and transcriptional regulation in the evening.

[0301] Components of the core clock mechanism and proximal signaling mechanism emanating from it, could be modified in such manner as to positively affect crop performance, as by for example shifting or extending the relationship between sources and sinks such as leaves and ears. Wholesale genetic complementation of diurnal patterns from different germplasm sources has been shown augment the combined diurnal patterns and apparent fitness (Ni, (2009)).

### Example 2

### Genomic Structures of ZmCCA1 and ZmLHY

[0302] In the course of working out the maize gene models for ZmCCA1 and ZmLHY it was revealed that the genes are encoded by genic regions of circa 45 kb and 78 kb respectively (FIG. 4). Maize genes of this size are extremely rare, where the average gene size is closer to 4 kb (Bruggmann, et al., (2006) Genome Res 16:1241-1251). The exon-intron model of ZmCCA1 and ZmLHY genes was deduced from alignment of their cDNA and genomic sequences obtained from BAC sequencing. The ZmCCA1 gene is composed of 11 exons separated by 10 introns of various lengths. The longest are intron#2 (˜9 kb) and intron#6 (˜15.6 kb) which are rarely seen in maize genome. The translation start codon ATG is located in exon#5. This means that the untranslated 5′ UTR is divided into 5 small exons ranging in the sizes of 40-200 bp. The ZmLHY gene is composed of 10 exons separated by 9 introns of various lengths. (It is likely that one of the small exon is missing in available ESTs). The intron 2 is −30.0 kb and intron 6 is ˜20.1 kb that are likely the largest introns in the maize genome. It is known that regulatory sequences controlling gene expression are often located in introns. The unusually long introns may play a role in ZmCCA1 and ZmLHY regulation. Both ZmCCA1 and ZmLHY genes are extremely long. Exceptionally long genes could slow transcription, thereby be a form of genomic regulation of gene expression. Similar to ZmCCA1 the translation start codon ATG is located in the exon 5. The complex exonic structures of the 5′UTRs suggest that maturation of pre-mRNA may be the other level of regulation of these genes.

### DNA Sequencing

[0303] The BAC clones were sequenced using the double-stranded random shotgun approach (Bodenteich, et al., Shotgun cloning or the strategy of choice to generate template for high-throughput dideoxynucleotide sequencing, in: M.D. Adams, C. Fields, J. C. Venter (Eds.), Automated DNA Sequencing and Analysis, Academic Press, San Diego, 1994, pp. 42-50). Briefly, after the BAC clones were isolated via a double-acetate cleared lysate protocol, they were sheared by nebulization and the resulting fragments were end-repaired and subcloned into pBluescript II SK(+). After transformation into DH-10B electro-competent Escherichia coli cells (Invitrogen) via electroporation, the colonies were picked with an automatic Q-Bot colony picker (Genetix) and stored at −80° C. in freezing media containing 6% glycerol and 100 μg/ml Ampicillin. Plasmids then were isolated, using the Templiphi DNA sequencing template amplification kit method (GE Healthcare). Briefly, the Templiphi method uses bacteriophage φ29 DNA polymerase to amplify circular single-stranded or double-stranded DNA by isothermal rolling circle amplification (Reagin, et al., (2003) J. Biomol. Techniques 14:143-148). The amplified products then were denatured at 95° C. for 10 min and end-sequenced in 384-well plates, using vector-primed M13 oligonucleotides and the ABI BigDye version 3.1 Prism sequencing kit. After ethanol-based cleanup, cycle sequencing reaction products were resolved and detected on Perkin-Elmer ABI 3730×1 automated sequencers, and individual sequences were assembled with the public domain Phred/Phrap/Consed package (on the world wide web at:phrap.org/phredphrapconsed.html). Contig order was viewed and confirmed with Exgap (A. Hua, University of Oklahoma, personal communication). Exgap is a local graphic tool that uses pair read information to order contigs generated by Phred, Phrap and Consed, and confirm the accuracy of the Phrap-based assembly. Subsequently, a majority of the sequencing gaps between contigs of interest were closed by sequencing plasmid DNA templates previously amplified with the Templiphi amplification kit method, in the presence of custom-designed sequencing primers and by inserting the resulting custom sequences to the original Phrap-based assemblies. Sequencing overlaps with public BAC DNA sequences (namely, ZMMBBc0099K11 (GenBank AC211312.1) and ZMMBBc0076L18 (GenBank AC213378.3) from the National Center for Biotechnology Information's nucleotide database) also were used to confirm remaining gap sequences between contigs of interest.

### Example 3

### Diurnally Regulated Promoters

[0304] Diurnal (day/light) cycles in light and temperature are environmental factors that all living organisms are adapted to. Virtually all aspects of plant physiology such as growth, development, photosynthesis and photo-assimilate partitioning, respiration, stress response, hormone response, nitrogen assimilation are diurnally regulated.

[0305] The time-of-the day promoters provide the tools for manipulating the specific physiological or metabolic process in a controlled manner according to the natural diurnal pattern. For example, the artificial down regulation of the morning clock genes CCA1 and LHY during the day will lead to the up-regulation of genes involved in photosynthesis and carbohydrate metabolism boosting the growth vigor and yield. To achieve down regulation the CCA1 and LHY promoters may drive their own RNAi expression cassettes.

[0306] The genome wide diurnal RNA profiling provides candidates for promoters for every phase of the day with high-inducibility and low background. Depending on what is needed specific time-of-day examples that are pulsate (i.e., transcribed only briefly once per day), broad peaked (e.g., transcribed 12 h on, 12 h off) or anywhere in between.

[0307] Genes involved in a variety of agronomic traits such as, for example, freezing tolerance, chilling or cold tolerance, drought tolerance, yield increase through improved metabolism are suitable for modulation by the diurnal regulatory elements disclosed herein. Optionally, these diurnal elements are used in combination with tissue specific promoters to optimize desired expression pattern of the genes of interest. For example, in an embodiment, genes that improve drought tolerance are expressed under the control of a diurnal regulatory element that exhibits a peak expression pattern around noon or late afternoon and in combination with a root-specific promoter element. Similarly, genes that improve tolerance to chilling and freezing are expressed under the control of a diurnal regulatory element that exhibits a peak expression pattern at dawn or night and in combination with a leaf-specific promoter element. In addition, genes that are involved in carbohydrate metabolism and source/sink relationships during photosynthesis are expressed under the control of diurnal promoter elements disclosed herein in combination with one or more tissue specific promoter elements. A variety of genes are known to be involved in abiotic stress tolerance and nitrogen use efficiency (see, e.g., US Patent Application Publication Numbers US 2010/0223695; US 2010/0313304; US 2010/0269218). As shown in FIG. 5, genes belonging to various functional categories exhibit different diurnal expression pattern. For example, GO:0009651 response to salt stress peaks during mid-morning whereas GO:0008643 carbohydrate transport peaks at night.

[0308] Genes that are co-regulated from related pathways with those that are diurnally regulated are also within the scope of this disclosure. Expression of those related pathway members are manipulated to be better regulated through the use of one or more diurnal regulatory elements disclosed herein.

### Promoter Motif Analysis Process

[0309] It has been shown in the literature that the combination of just a few motifs, through constructive and destructive interference, can produce waveforms that peak under any phase shift. (such as CBE: Wang, et al., (1997) Plant Cell 9:491-507 and EE: Alabadí, et al., (2001) Science 293:880-883. However, the extent of both the number of these controlling elements and their conservation across plant species has not been adequately addressed. Promoters of the 144 maize genes were grouped by Zeitgeber time, the timing of their peak expression, Where ZT0=6 am, ZT4=10 am, ZT8=2 pm, ZT12=6 pm, ZT16=10 pm and ZT20=2 am. Each group of promoters was analyzed for the existence of motifs identified in the distant species Arabidopsis Thaliana. The motifs were “CBE”, “EE”, “O-G-box”, “Morning Element”, “SORLIP1”, “Refined Morning Consesnus”, “Evening GATA”, “Telo Box”, “Starch Box” and “Protein Box”. These motifs were identified via literature search, and include motifs that have been identified for morning, evening and night expression. Promoters were scanned for exact matches of the motifs in both forward and reverse orientations within 2000 bp of the TSS.

TABLE 2

| ELEMENT | SEQUENCE | SEQ ID |
|---|---|---|
| CBE | AAAAATCT | SEQ ID NO: 472 |
| CBE’ | AGATTTTT | SEQ ID NO: 473 |
| EE | AAATATCT | SEQ ID NO: 474 |
| EE’ | AGATATTT | SEQ ID NO: 475 |
| o G-Box | GCCACGTG | SEQ ID NO: 476 |
| o B-Box’ | CACGTGGC | SEQ ID NO: 477 |
| Morning Element | AACCAC | SEQ ID NO: 478 |
| Morning Element’ | GTGGTT | SEQ ID NO: 479 |
| SORLIP1 | GCCAC | SEQ ID NO: 480 |
| SORLIP1’ | GTGGC | SEQ ID NO: 481 |
| Refined Morning Element | CCACAC | SEQ ID NO: 482 |
| Refined Morning Element’ | GTGTGG | SEQ ID NO: 483 |
| Evening GATA | GGATAAG | SEQ ID NO: 484 |
| Evening GATA’ | CTTATCC | SEQ ID NO: 485 |
| TeloBox | AAACCCT | SEQ ID NO: 486 |
| TeloBox’ | AGGGTTT | SEQ ID NO: 487 |
| StarchBox | AAAGCCC | SEQ ID NO: 488 |
| StarchBox’ | GGGCTTT | SEQ ID NO: 489 |
| Protein Box | ATGGGCC | SEQ ID NO: 490 |
| Protein Box’ | GGCCCAT | SEQ ID NO: 491 |

[0310] Circadian motifs were culled from an extensive literature search, including: CBE: Carré and Kay, (1995) Plant Cell 7 2039-2051. EE: Harmer and Kay, (2005) Plant Cell 17 1926-1940.

G-BOX,TELO, STARCH, PROTEIN and GATA: Michael, et al., (2008). PLoS Genet. 4e14. SORLIP and Refined Morning Consensus: Hudson and Quail, (2003) Plant Physiol. 133 1605-1616. Morning Element: Harmer and Kay, (2005) Plant Cell 17 1926-1940.

[0311] Hidden Markov Models (HMMs) were built for the EE and CBE motifs from several genes containing the motifs that cycled both significantly and in the same appropriate phase as their Arabidopsis ortholog. These HMMs showed no preference for any surrounding bases, hence the exact core motifs were used for further analysis. Exact matches to both the motif and reverse complement were pulled from sequences where present. Both the number of genes and the sum total of motifs found were compared against a random probability and against the rest of the set to search for enrichment.

### Motif Analysis Results

[0312] The “CBE motif”, an 8 bp motif also known as the CCA1 Binding Element, should appear at random13 times in a set the size of the current analysis; the exact CBE motif was found 40 times in the 144 promoters. The CBE was enriched in genes found during daylight hours, which follows the expression pattern of the maize ortholog of Arabidopsis thaliana CCA1 (included in this disclosure).

[0313] The “EE motif”, an 8 bp motif also known as the Evening Element, should appear at random13 times in a set the size of the current analysis; the exact EE motif was found 34 times in the 144 promoters. Furthermore, the prevalence of the motif was concentrated in those promoters that corresponded to evening and night peaking genes, with >40% of the motifs lying in promoters of the ZT12 group and >70% of the instances lying between 6 μm-2 am. Among those genes with peak expression at ZT12, 12/23 genes contained at least one EE.

[0314] The “O-G-Box” has been identified as morning driven motif and the data here show that 50% of all O-G-Box motifs found were for the first time point after the onset of light, ZT4. Other morning elements, “Morning Element”, “SORLIP1” and “Refined Morning Element”, all showed similar patterns, with peak enrichment in those time points immediately after the onset of light (28%, 33% and 31% respectively), consistent with the theory that these promoters are light driven. Also consistent with this is the fact that given the long day period in that plants were grown in to generate the initial data, the presence of these promoters in selected against in the two true-dark time points, ZT16 and ZT20.

[0315] The “Evening GATA”, “Telo Box”, “Starch Box” and “Protein Box” motif have all been identified as evening to late night motifs. Here, there is an under-enrichment of these motifs in those timepoints defined as midday, when light is the brightest. The relatively broad spectrum of these elements across all evening and night time points is consistent with the theory of multiple motifs combining to produce different phases of peak expression.

[0316] It is important to note that many of the 144 promoters identified carried more than one motif, the median number of motifs found per promoters was 4, and the maximum number of motifs found was 12. Twelve of the promoters contain none of the motifs at all, spanning every time point. In the ZT12 peaking set, which includes the highly prevalent EE motif, 11/23 genes contained no canonical EE and as stated above, several contained no known motifs at all, indicating that other factors and motifs are at play causing the high amplitude observed waveforms, which nonetheless may be contained within the promoter sequences disclosed herein.

### Promoter Expression Analysis

### Seedling Prep

[0317] GS3 seeds were sterilized and prepared for germination by washing with 70% ethanol for five minutes, followed a 15 minute wash in a solution of 50% bleach with two drops of Tween® 20. Then three washes in sterile water for 5, 15 and 5 minutes. The seeds were then washed in 30% Hydrogen Peroxide for 5 minutes, then washed 3 times with sterile water. The seeds were then allowed to soak in sterile water for 5 hours.

[0318] Sterile germination paper was moistened with 15 ml of sterile water and placed in sterile Q-trays. Sixteen seeds per tray were placed at regular intervals and covered with another sterile germination paper and dampened with 9 ml of sterile water. The Q-tray was sealed with Austraseal tape, and placed in a growth chamber with light at 22° C., and allowed to grow for 3 days.

[0319] The pericarp material covering the developing seedling was removed and the germinated seedlings were placed, 2 per plate, on media containing 4.3% MS Basal Salts, 0.1% Myo-inositol, 0.5% MS Vitamin stock and 40% sucrose, at pH 5.6.

### Leaf Prep and Bombardment

[0320] One inch wide cross sections were isolated from the youngest leaf (partially emerged) of a 2½ to 3 week old GS3 seedling and placed on media for bombardment containing 4.3% MS Basal Salts, 0.1% Myo-inositol, 0.5% MS Vitamin stock and 40% sucrose, at pH 5.6.

### Embryo Prep

[0321] Immature maize embryos from greenhouse donor plants are bombarded with a plasmid containing the GUS gene operably linked to a test promoter. Transformation is performed as follows.

[0322] Maize GS3 ears are harvested 8-14 days after pollination and surface sterilized in 30% Chlorox® bleach plus 0.5% Micro detergent for 20 minutes and rinsed two times with sterile water. The immature embryos are excised and placed embryo axis side down (scutellum side up), 25 embryos per plate. These are cultured on 560 L medium 4 days prior to bombardment in the dark. Medium 560 L is an N6-based medium containing Eriksson's vitamins, thiamine, sucrose, 2,4-D and silver nitrate. The day of bombardment, the embryos are transferred to 560Y medium for 4 hours and are arranged within the 2.5-cm target zone. Medium 560Y is a high osmoticum medium (560 L with high sucrose concentration). Following bombardment, the embryos are kept on 560Y medium, an N6 based medium, for 1 day, then stained for GUS expression.

### Bombardment

[0323] DNA/gold particle mixtures were prepared for bombardment in the following method: 60 mg of 0.6-1.0 micron gold particles were pre-washed with ethanol, rinsed with sterile distilled H₂O and resuspended in a total of 1 mL of sterile H₂O. DNA was precipitated onto the surface of the gold particles by sonicating 25 μL of pre-washed 0.6 μM gold particles and adding to 20 μL of test plasmid at 100 ng/μL. This mixture was sonicated once again and 2.5 μL of TFX was added. That solution was placed on a vortex shaker for 10 minutes at a low setting. The solution was then centrifuged for 1 min at 10K RPM, and the liquid removed from the tube. 60 μL of ethanol was added, then the solution was sonicated once again. 10 μL of the DNA/gold mixture was then placed onto each macrocarrier and allowed to dry before bombardment.

[0324] Seedlings were bombarded using the PDS-1000/He gun at 1100 psi for leaf and seedling tissue and 450 psi for embryos, under 27-28 inches of Hg vacuum. The distance between macrocarrier and stopping screen was between 6 and 8 cm. Plates were incubated in sealed containers for 18-24 h at 27-28° C. following bombardment. Two plates from each construct were incubated in the dark, while two plates were incubated in the light.

[0325] The bombarded tissues were assayed for transient GUS expression by immersing the seedlings in GUS assay buffer containing 100 mM NaH₂PO₄—H₂O (pH 7.0), 10 mM EDTA, 0.5 mM K₄Fe(CN)₆-3H₂O, 0.1% Triton X-100 and 2 mM 5-bromo-4-chloro-3-indoyl glucuronide. The tissues were incubated in the dark for 24 h at 37° C. Replacing the GUS staining solution with 70% ethanol stopped the assay. GUS expression/staining was visualized under a microscope.

### BMS Transformation

[0326] BMS (Black Mexican Sweet) cells were grown in 250 ml flasks containing 40 ml of #237 media (4.3% MS Basal Salts, 0.1% Myo-inositol, 0.5% MS Vitamin stock, 0.002% 2,4-D and 40% sucrose, at pH 5.6) in the dark at 28° C. and shaking at ˜150 RPM for 3 days. At that time, 25 ml of #237 liquid media was added and the culture was allowed to continue to grow for another 3 days, at which time the agro transformation could take place. One day prior to that, agrobacterium cultures containing a plasmid containing the GUS gene operably linked to a test promoter was place in a 10 ml culture containing the appropriate antibiotic and allowed to grow at 28° C. overnight.

[0327] Each 250 mL flask was placed in the laminar flow hood for 10 minutes to allow the cells to settle. 20 ml of supernatant was removed. The remaining mixture was moved to a 50 ml tube and centrifuged at 3200 RPM for 5 min. The supernatant was removed and replaced with 40 ml of 561Q liquid media. 561Q is a 4% N6-based medium containing Eriksson's vitamins (1×), 0.005% Thiamine, 68.5% sucrose, 0.0015% 2,4-D, 0.69% L-Proline and 36% glucose, at pH 5.2. The cells were again centrifuged at 3200 RPM for 5 min. The cells were resuspended to a final volume of 15 ml in 561Q and split into 7.5 ml aliquots in 125 ml flasks.

[0328] The agro culture was then centrifuged at 3200 RPM for 5 minutes, the supernatant poured off, and the pellet resuspended in 2 mL of 561Q+Acetosyringine (AS). The Acetosyringine solution was prepared by making a 100 mM solution in DMSO. This solution was added to 561Q at 1 uL A.S./1 mL #561Q. The absorbance at OD550 was measured to determine the concentration of cells to use for transformation. At an OD550 of 0.75, 1 ml of the agro solution was added to 5 ml of 561Q+AS, and that was co-cultured with the 7.5 mls of BMS cells for 3 hours in the dark at 28° C. while shaking at 150 RPM.

[0329] After the 3 hour incubation, more 561Q media was added to the 13.5 ml of culture to bring the volume to ˜48 ml in a 50 ml tube. 12 ml of culture was applied to a sterile filter disk, then placed on a plate of 562U media in the dark at 28° C. for 4 days. 562U is a 4% N6-based medium containing Eriksson's vitamins (1×), 0.005% Thiamine, 30% sucrose, 0.002% 2,4-D and 0.69% L-Proline, at pH 5.8. The filters were then moved to 563N plates and placed in the dark at 28° C. for an additional 2 days. 563N is a 4% N6-based medium containing Eriksson's vitamins (1×), 0.005% Thiamine, 30% sucrose, 0.0015% 2,4-D, 0.69% L-Proline and 0.5% MES Buffer at pH 5.8.

[0330] Four plates were created for each test construct. Two BMS plates from each were pulled from the dark and stained for GUS, while two others were placed in the light for 5 hours before staining for GUS. The BMS cells were scraped from the filter into a new tube and were assayed for transient GUS expression by immersing the cells in GUS assay buffer containing 100 mM NaH₂PO₄—H₂O (pH 7.0), 10 mM EDTA, 0.5 mM K₄Fe(CN)₆-3H₂O, 0.1% Triton X-100 and 2 mM 5-bromo-4-chloro-3-indoyl glucuronide. The tissues were incubated in the dark for 24 h at 37° C. Replacing the GUS staining solution with 70% ethanol stopped the assay. GUS expression/staining was visualized under a microscope.

### Representative Promoter Expression Results

### Zm-SARK PRO (PCO646468)

[0331] Expression was detected with the ZM-SARK PRO construct, in the bombardment of germinating seedlings, but not in leaf, or embryo bombardment or in BMS transformations.

### Zm-CCA PRO (PCO651594)

[0332] Expression was detected with the ZM-CCA PRO construct in every tissue type that was tested.

### ZM-LHY PRO:ADH1 INTRON (PCO639678)

[0333] Expression was detected with the ZM-LHY PRO construct, in the bombardment of embryos, but not in leaf or seedling bombardment or in BMS transformations.

### ZM-LHY PRO (ALT1) (PCO639678)

[0334] Expression was detected with the ZM-LHY PRO(ALT1) construct, in all bombardment experiments, but not in BMS transformations.

### ZM-NIGHT2 PRO (PCO643174)

[0335] Expression was detected with the ZM-NIGHT2 PRO construct, in the bombardment of embryos, and leaf, but not in embryo bombardment or in BMS transformations.

### ZM-NIGHT1 PRO (PCO503721)

[0336] No detectable expression was found with the ZM-NIGHT1 PRO construct in the tissue tested. It may be possible that the expression pattern, being diurnal, may not have been captured in the tested conditions.

### ZM-LICH2 PRO (PCO642613)

[0337] Expression was detected with the ZM-LICH2 PRO construct in every tissue was tested.

### Example 4

### Transformation and Regeneration of Transgenic Plants

[0338] Immature maize embryos from greenhouse donor plants are bombarded with a plasmid containing the transformation sequence operably linked to the drought-inducible promoter RAB17 promoter (Vilardell, et al., (1990) Plant Mol Biol 14:423-432) and the selectable marker gene PAT, which confers resistance to the herbicide Bialaphos. Alternatively, the selectable marker gene is provided on a separate plasmid. Transformation is performed as follows. Media recipes follow below.

[0339] Preparation of Target Tissue:

[0340] The ears are husked and surface sterilized in 30% Clorox® bleach plus 0.5% Micro detergent for 20 minutes and rinsed two times with sterile water. The immature embryos are excised and placed embryo axis side down (scutellum side up), 25 embryos per plate, on 560Y medium for 4 hours and then aligned within the 2.5-cm target zone in preparation for bombardment.

[0341] Preparation of DNA:

[0342] A plasmid vector comprising the transformation sequence operably linked to an ubiquitin promoter is made. This plasmid DNA plus plasmid DNA containing a PAT selectable marker is precipitated onto 1.1 μm (average diameter) tungsten pellets using a CaCl₂ precipitation procedure as follows:

[0343] 100 μl prepared tungsten particles in water

[0344] 10 μl (1 μg) DNA in Tris EDTA buffer (1 μg total DNA)

[0345] 100 μl 2.5 M CaC1₂

[0346] 10 μl 0.1 M spermidine

[0347] Each reagent is added sequentially to the tungsten particle suspension, while maintained on the multitube vortexer. The final mixture is sonicated briefly and allowed to incubate under constant vortexing for 10 minutes. After the precipitation period, the tubes are centrifuged briefly, liquid removed, washed with 500 ml 100% ethanol, and centrifuged for 30 seconds. Again the liquid is removed and 105 μl 100% ethanol is added to the final tungsten particle pellet. For particle gun bombardment, the tungsten/DNA particles are briefly sonicated and 10 μl spotted onto the center of each macrocarrier and allowed to dry about 2 minutes before bombardment.

[0348] Particle Gun Treatment:

[0349] The sample plates are bombarded at level #4 in particle gun #HE34-1 or #HE34-2. All samples receive a single shot at 650 PSI, with a total of ten aliquots taken from each tube of prepared particles/DNA.

[0350] Subsequent Treatment:

[0351] Following bombardment, the embryos are kept on 560Y medium for 2 days, then transferred to 560R selection medium containing 3 mg/liter Bialaphos and subcultured every 2 weeks. After approximately 10 weeks of selection, selection-resistant callus clones are transferred to 288J medium to initiate plant regeneration. Following somatic embryo maturation (2-4 weeks), well-developed somatic embryos are transferred to medium for germination and transferred to the lighted culture room. Approximately 7-10 days later, developing plantlets are transferred to 272V hormone-free medium in tubes for 7-10 days until plantlets are well established. Plants are then transferred to inserts in flats (equivalent to 2.5″ pot) containing potting soil and grown for 1 week in a growth chamber, subsequently grown an additional 1-2 weeks in the greenhouse, then transferred to classic 600 pots (1.6 gallon) and grown to maturity. Plants are monitored and scored for increased drought tolerance. Assays to measure improved drought tolerance are routine in the art and include, for example, increased kernel-earring capacity yields under drought conditions when compared to control maize plants under identical environmental conditions. Alternatively, the transformed plants can be monitored for a modulation in meristem development (i.e., a decrease in spikelet formation on the ear). See, for example, Bruce, et al., (2002) Journal of Experimental Botany 53:1-13.

[0352] Bombardment and Culture Media:

[0353] Bombardment medium (560Y) comprises 4.0 g/l N6 basal salts (SIGMA C-1416), 1.0 ml/l Eriksson's Vitamin Mix (1000×SIGMA-1511), 0.5 mg/l thiamine HCl, 120.0 g/l sucrose, 1.0 mg/l 2,4-D and 2.88 g/l L-proline (brought to volume with D-I H₂O following adjustment to pH 5.8 with KOH); 2.0 g/l Gelrite® (added after bringing to volume with D-I H₂O) and 8.5 mg/l silver nitrate (added after sterilizing the medium and cooling to room temperature). Selection medium (560R) comprises 4.0 g/l N6 basal salts (SIGMA C-1416), 1.0 ml/l Eriksson's Vitamin Mix (1000×SIGMA-1511), 0.5 mg/l thiamine HCl, 30.0 g/l sucrose and 2.0 mg/l 2,4-D (brought to volume with D-I H₂O following adjustment to pH 5.8 with KOH); 3.0 g/l Gelrite® (added after bringing to volume with D-I H₂O) and 0.85 mg/l silver nitrate and 3.0 mg/l bialaphos (both added after sterilizing the medium and cooling to room temperature).

[0354] Plant regeneration medium (288J) comprises 4.3 g/l MS salts (GIBCO 11117-074), 5.0 ml/l MS vitamins stock solution (0.100 g nicotinic acid, 0.02 g/l thiamine HCL, 0.10 g/l pyridoxine HCL and 0.40 g/l glycine brought to volume with polished D-I H₂O) (Murashige and Skoog, (1962) Physiol. Plant. 15:473), 100 mg/l myo-inositol, 0.5 mg/l zeatin, 60 g/l sucrose, and 1.0 ml/l of 0.1 mM abscisic acid (brought to volume with polished D-I H₂O after adjusting to pH 5.6); 3.0 g/l Gelrite® (added after bringing to volume with D-I H₂O) and 1.0 mg/l indoleacetic acid and 3.0 mg/l bialaphos (added after sterilizing the medium and cooling to 60° C.). Hormone-free medium (272V) comprises 4.3 g/l MS salts (GIBCO 11117-074), 5.0 ml/I MS vitamins stock solution (0.100 g/l nicotinic acid, 0.02 g/l thiamine HCL, 0.10 g/l pyridoxine HCL and 0.40 g/l glycine brought to volume with polished D-I H₂O), 0.1 g/1 myo-inositol and 40.0 g/l sucrose (brought to volume with polished D-I H₂O after adjusting pH to 5.6) and 6 g/l Bacto™-agar (added after bringing to volume with polished D-I H₂O), sterilized and cooled to 60° C.

### Example 5

### Agrobacterium-Mediated Transformation

[0355] For Agrobacterium-mediated transformation of maize with an antisense sequence of the transformation sequence of the present disclosure, preferably the method of Zhao is employed (U.S. Pat. No. 5,981,840 and PCT Publication Number WO98/32326, the contents of which are hereby incorporated by reference). Briefly, immature embryos are isolated from maize and the embryos contacted with a suspension of Agrobacterium, where the bacteria are capable of transferring the transformation sequence to at least one cell of at least one of the immature embryos (step 1: the infection step). In this step the immature embryos are preferably immersed in an Agrobacterium suspension for the initiation of inoculation. The embryos are co-cultured for a time with the Agrobacterium (step 2: the co-cultivation step). Preferably the immature embryos are cultured on solid medium following the infection step. Following this co-cultivation period an optional “resting” step is contemplated. In this resting step, the embryos are incubated in the presence of at least one antibiotic known to inhibit the growth of Agrobacterium without the addition of a selective agent for plant transformants (step 3: resting step). Preferably the immature embryos are cultured on solid medium with antibiotic, but without a selecting agent, for elimination of Agrobacterium and for a resting phase for the infected cells. Next, inoculated embryos are cultured on medium containing a selective agent and growing transformed callus is recovered (step 4: the selection step). Preferably, the immature embryos are cultured on solid medium with a selective agent resulting in the selective growth of transformed cells. The callus is then regenerated into plants (step 5: the regeneration step) and preferably calli grown on selective medium are cultured on solid medium to regenerate the plants. Plants are monitored and scored for a modulation in meristem development. For instance, alterations of size and appearance of the shoot and floral meristems and/or increased yields of leaves, flowers and/or fruits.

### Example 6

### Over Expression of Maize Diurnal Genes Affect Plant Size and Growth

[0356] The function of the diurnal gene is tested by using transgenic plants expressing the transgene. Transgene expression is confirmed by using transgene-specific primer RT-PCR.

[0357] Vegetative Growth and Biomass Accumulation:

[0358] Compared to the non transgenic sibs, the transgenic plants (in T1 generation) would be expected to show an increase in plant height. The stem of the transgenic plants is measured by comparing stem diameter values with those of non-transformed controls. The increase of the plant height and the stem thickness would result in a larger plant stature and biomass for the transgenic plants.

[0359] Diurnal genes are found to impact plant growth mainly through accelerating the growth rate but not extending the growth period. The enhanced growth, i.e., increased plant size and biomass accumulation, appears to be largely due to an accelerated growth rate and not due to an extended period of growth because the transgenic plants were not delayed in flowering based on the silking and anthesis dates. Therefore, overexpressing of the diurnal gene could accelerate the growth rate of the plant. Accelerated growth rate appears to be associated with an increased diurnal rate.

[0360] The enhanced vegetative growth, biomass accumulation in transgenics and accelerated growth rate would be further tested with extensive field experiments in both hybrid and inbred backgrounds at advanced generation (T3). Transgenic plants would be expected to show one or more of the following: increased plant height, stem diameter increases, stalk dry mass increase, increased leaf area, total plant dry mass increases.

[0361] Reproductive Growth and Grain Yield:

[0362] Overexpression of the diurnal genes would be associated with enhancing the reproductive tissue growth. T1 Transgenic plants would be expected to show one or more of the following: increased ear length, increased total kernel weight per ear, increased kernel numbers per ear and kernel size. The positive change in kernel and ear characteristics is associated with grain yield increase.

[0363] The enhanced reproductive growth and grain yield of transgenics is confirmed in extensive field experiments at the advanced generation (T3). The enhancement is observed in both inbred and hybrid backgrounds. As compared to the non-transgenic sibs as controls, the transgenic plants would be expected to show a significantly increase in one or more of the following: primary ear dry mass, secondary ear dry mass, tassel dry mass and husk dry mass.

Transgenic plants are also scored for stress tolerance parameters, including: reduced ASI, reduced barrenness and reduced number of aborted kernels. The reduction may be more when the plants are grown at a high plant density stressed condition. A reduced measurement of these parameters is often related to tolerance to biotic stress.

### Example 7

### Variants of Diurnal Sequences

[0364] A. Variant Nucleotide Sequences of Diurnal Sequences that do not Alter the Encoded Amino Acid Sequence

[0365] The diurnal nucleotide sequences are used to generate variant nucleotide sequences having the nucleotide sequence of the open reading frame with about 70%, 75%, 80%, 85%, 90% and 95% nucleotide sequence identity when compared to the starting unaltered ORF nucleotide sequence of the corresponding SEQ ID NO. These functional variants are generated using a standard codon table. While the nucleotide sequence of the variants are altered, the amino acid sequence encoded by the open reading frames do not change.

[0366] B. Variant Amino Acid Sequences of Diurnal Polypeptides

[0367] Variant amino acid sequences of the diurnal polypeptides are generated. In this example, one amino acid is altered. Specifically, the open reading frames are reviewed to determine the appropriate amino acid alteration. The selection of the amino acid to change is made by consulting the protein alignment (with the other orthologs and other gene family members from various species). An amino acid is selected that is deemed not to be under high selection pressure (not highly conserved) and which is rather easily substituted by an amino acid with similar chemical characteristics (i.e., similar functional side-chain). Using a protein alignment, an appropriate amino acid can be changed. Once the targeted amino acid is identified, the procedure outlined in the following section C is followed. Variants having about 70%, 75%, 80%, 85%, 90% and 95% nucleic acid sequence identity are generated using this method.

[0368] C. Additional Variant Amino Acid Sequences of Diurnal Polypeptides

[0369] In this example, artificial protein sequences are created having 80%, 85%, 90% and 95% identity relative to the reference protein sequence. This latter effort requires identifying conserved and variable regions from the alignment and then the judicious application of an amino acid substitutions table. These parts will be discussed in more detail below.

[0370] Largely, the determination of which amino acid sequences are altered is made based on the conserved regions among each diurnal protein or among the other polypeptides. Based on the sequence alignment, the various regions of the polypeptide that can likely be altered are represented in lower case letters, while the conserved regions are represented by capital letters. It is recognized that conservative substitutions can be made in the conserved regions below without altering function. In addition, one of skill will understand that functional variants of the sequence of the disclosure can have minor non-conserved amino acid alterations in the conserved domain.

[0371] Artificial protein sequences are then created that are different from the original in the intervals of 80-85%, 85-90%, 90-95% and 95-100% identity. Midpoints of these intervals are targeted, with liberal latitude of plus or minus 1%, for example. The amino acids substitutions will be effected by a custom Perl script. The substitution table is provided below in Table 3.

TABLE 3
Substitution Table

| | Strongly | | |
|---|---|---|---|
| | Similar and | Rank of | |
| | Optimal | Order to | |
| Amino Acid | Substitution | Change | Comment |
| I | L, V | 1 | 50:50 substitution |
| L | I, V | 2 | 50:50 substitution |
| V | I, L | 3 | 50:50 substitution |
| A | G | 4 | |
| G | A | 5 | |
| D | E | 6 | |
| E | D | 7 | |
| W | Y | 8 | |
| Y | W | 9 | |
| S | T | 10 | |
| T | S | 11 | |
| K | R | 12 | |
| R | K | 13 | |
| N | Q | 14 | |
| Q | N | 15 | |
| F | Y | 16 | |
| M | L | 17 | First methionine cannot change |
| H | | Na | No good substitutes |
| C | | Na | No good substitutes |
| P | | Na | No good substitutes |

[0372] First, any conserved amino acids in the protein that should not be changed is identified and “marked off” for insulation from the substitution. The start methionine will of course be added to this list automatically. Next, the changes are made.

[0373] H, C and P are not changed in any circumstance. The changes will occur with isoleucine first, sweeping N-terminal to C-terminal. Then leucine, and so on down the list until the desired target it reached. Interim number substitutions can be made so as not to cause reversal of changes. The list is ordered 1-17, so start with as many isoleucine changes as needed before leucine, and so on down to methionine. Clearly many amino acids will in this manner not need to be changed. L, I and V will involve a 50:50 substitution of the two alternate optimal substitutions.

[0374] The variant amino acid sequences are written as output. Perl script is used to calculate the percent identities. Using this procedure, variants of the polypeptides are generating having about 80%, 85%, 90% and 95% amino acid identity to the starting unaltered ORF nucleotide sequence of SEQ ID NOS: 1, 3, 5 and 40-71.

### Example 8

### Alteration of Traits in Plants with the Use of Regulatory Elements and Polypeptides Disclosed Herein

[0375] The various regulatory elements including diurnal promoters and diurnal polypeptides disclosed herein are useful for a variety of trait development for crop plants. These include engineering freezing or frost tolerance, chilling or cold tolerance, drought or heat tolerance, salt stress tolerance, reduced photorespiration, stomatal aperture regulation, photosynthetic efficiency for yield increase, carbohydrate metabolism and transport, enhanced nitrogen utilization, selective metabolite biosynthesis, improved nutrient assimilation, source/sink modulation, disease resistance, insect resistance and pest resistance. One or more regulatory elements disclosed herein are combined with other regulatory elements including various stress inducible or tissue specific motifs to optimize transgene expression.

[0376] All publications and patent applications in this specification are indicative of the level of ordinary skill in the art to which this disclosure pertains. All publications and patent applications are herein incorporated by reference to the same extent as if each individual publication or patent application was specifically and individually indicated by reference.

[0377] The disclosure has been described with reference to various specific and preferred embodiments and techniques. However, it should be understood that many variations and modifications may be made while remaining within the spirit and scope of the disclosure.

The application's sequence listing, which the Patent Office published only in electronic form, follows.

SEQUENCE LISTING (491 sequences)

SEQ ID NO: 1 - DNA, 1562 bp, Zea mays
ggggatggaggaggaggcgtctgcagatccaccgaccgcttcgtccttcgcctgcgtctctggttccgggcgctgctgaatccgacgcttcggttcgcgtccccagtccccttggcggaggcgtggatcgtgtgtttggggggtctgggtatggtgggcggaggcgagggggatcgcgtgggcggcggcgtaggggttgggggaggccagcagttcgtggaccggagcaaggtgaggattcttctctgcgacggcgacgccagcagctcccgggaggtgctgcggctcctctgcaactgctcgtaccatgtaacttgcgccaagtctccgcggcaggtgatcaatattctcaactacgagggcggcgagatcgacatcatcctggctgaggttgatctgccggtctccaagtgcttcaagatgctcaagtacattgccaggaacaaggacctgcgccacatccccatcatcatgatgtccaacagagacgaggtgtctgttgttgtcaagtgcttgaggcttggtgcggccgagtacctggtgaagccgctgcgcacgaatgagctgctgaacctttggacccatgtgtggcggcggagacggatgcttggtttgcccgagaaaaacttcttcaatgacaacttcgagttggtgctctcagaacctagtgatgcaaataccaatagcgccaccctcctctcagatgagacagacgacaggcctaaagaaaacacaaatcaagaaacgggcacctcaaatcagcttgaatacgagtctaatccttccgttgctgagcgcgaccagagagacaagatcggtgctccaggctctgccctagatgccagtcaatcatcgactccgggaagaatgttttcacgtcctataaaaactaacctgaaggttgctgagtcgtctgcatttctagcatatgttaagtcaagcaccccagccaccagctcatttgatagcggactacaaagaggtgacagccggttagattctttggataaccatggtaattgctctagtgcaacagatagaagtgacaccggtgctgatgtaaatattcggaataaagaagcttttgagatgcctgtgcagtatcctatggtatgcttttcttcctctagcatgcatatggagcgaagcaatgaaggccataatgacacttcaggaactccacctgcataccatttcccattttattatccagggatggtagaacacaacatggcactttcatcagtgcaaaattttcaagcaaacataaacagtgctcaagcacatacaccaccagcgatgcttcatcagtacaatgttttctcccaatgccatagtttacccatgatatcaccatttcagtttaatacttctggcatgagtatgcactcaagtcatttaccgacgcaaaatgtgtggtcatcggcatcgagcacaccaacgcctgacgaaacatgcaatcgctccgagagaagggctgcagcacttgctaaattcaggcagaaaaggaaagagcgctgttttgacaagaaggtgaggtatgtgaacaggaagaaacttgc

SEQ ID NO: 2 - DNA, 2014 bp, Zea mays
gcgagactccaccgcttcctctccgccgcgtcctcctcccctccctccgttcctcacggctctccggactcgccccgcggctggccgtgctgagtttcgttctctggccggcaaagaagcgatttttttgtgctttctggacggatcccggccggagaagggaccgaatttccacgacctcgaccgccggctgctcctctgctgggctctccgtgcgcaagaagagcctaccaaggtgaatccggagatttgagctccgggcccgcctcatggagtccatggcgcaggaaagggacgcgttggattcacctgccttgtcgattgacaaaaggctgcggtcggatgctgtcgaatcacccctggtggatgatgcaacgcaacccaaggagggggcggacggttaccctgtcaaggttcggaagccttacacgatcacgaagcagcgagagaagtggacagaggaagagcatgggaagttcctggaggcactgaagctctatggtcggtcttggcgccagatacaagaacacattggcacaaagactgctgtccagattcggagccatgctcagaagtttttctccaaggtcgtgcgtgaacctggggccagtaattcaattgagatcccaccccctaggccaaagagaaaaccactgcacccataccctcgcaagtgtgccgactccaccgtgacaaatgctccaatgggcgaaccgaagaatgctcctgtttcatcaccatctggttctgaccaagagaatggttcgcctgtctcggtgttatctgcaatgcagtcggatgcttttggttcatcaatatcaaacccatcaactgggggcacgtctcctgcgtcatcagatgatgggaataatgtccctgagatagtgaatggggaggaaaatttgctcactcagcaaatagaagaccgatcccatcaggaatcaaagcaggacaacagtgatggtgagctgtctgaagaagattcatcacgagtccaagaaaccagtttgaagctttttgggaagacagttatcatcccagacccaaagaaagtctgttcctcggatgggggagctggagatgatacacaagaagtgatgcaaacatcctgggttggaggaggggtggcagcataccctgcccataacggatggtttcttccgttccattctttccctgctcatatgtatgagtcaggggatgctaggatttcccctcttcatatgtggtggccttactacggttttccggccggccatccaagagggtttggcacagggctgcttaacgaaggcgccattgagagtgatgccgacaatagcccatcggttgaaactaattctgatcgcacgggcaatgttcatgttcagacgacgacccctaccattcacaacaatgctgtcaaggagtcagttgggccagttgagatgccagagtcgggtccgagcattgagctgaaacccagcgcgaactcggcctttgtaagagtgaagccgagcagcagcgtcagcggagaccaatcactggtaagggggttcgtgccatacaaaagatgtaaggtcgaataacccaacccaacgacatacctgtctgctgctaatcttactggagattgattgatcctgaacagtgtagggactcgagtggcacacatcccttgttccagtgtgcctgccattttttgcctgcaaaattggctgctggtgtatgtgtaatattgtcgttttactgcctgcagcggaatgtaagatgccgcaggcttgttgctgtcacctaggcgtagactgaacagatgttgtgcagggatcgccgatctctgcacccttatgtttgttgtacgaggaaaaccggattctgttgaactctcgtgttcaaaaattcattgattcctgatggaaactgatttgtaaatgaacatggcaatgccgccggacaggttacagtgtatcctgtaagaccaattcttttggtccttgaacaatggaatgcagactaggttttggtcattcaaagc

SEQ ID NO: 3 - DNA, 2310 bp, Zea mays
gccctcctacttgcagaatctccatttccccccgcaccaaaccagccaaaccactggcgcacgccgaggagagagaaagggggtgtgcggggcggcgaccggcctccgacgacgcggggcgtcgcggcgtcgtggcggtgaagcggatgaggctgtgggaggaggaggacgatgacgaggacgaggaggggatggaagtggacggggaggcggaagatgagccggggtggccgtgtggggcgccggaggcggggcccggcgaaacgaggccggcagcgatcctcgtggcggacgcggcggaggtcgacttccccgtcatctacgtcaacgccgccttcgaggccgccacggggtaccgcgcgcacgaggtgctcgggcggaactgccgattcctacaattccgggatccacatgcccaaaggcgacaccccctcgttgatcccatggtcgtttcagagattcggcgatgtctcagcgaggggatcgaattccaaggcgagctgctgaatttccggaaggacggtgctccacttcacaacagattaaggctcgttcctatgcacggcgatgatggctatgtgacgcatgttatcggaatccagctattctctgaggcgaacatcgatctcagcagcgtatcttatccggtgtacaagcaaaagtccagcagcaggcccagcattcaagatctgaactcatctccccacgagcacgctccgaaaatccagagcgcagaccactgcggcatgcttcagttgtcagacgaagttctcgcacacaacatcctatcccgcctgtccccaagagacgttgcgtccatcggatcggtgtgcaccagaatgcatgagctgaccaagaacgatcacctgaggaagatggtctgccagaacgcgtggggaagggacgtcaccgtgaggctggagatgagcaccaagatggtaggatggggccgtcttgcgagagagctaacaactctcgaggccgcctcatggcggaagttcacggtcggagggcgtgtcgagccttcccggtgcaacttcagtgcctgcgctgttggcaaccggcttgtcctgttcggagggggaaggcgtgaacatgcagcctatggacgacacgttcgtgctcaacctggaggccgcaacgccggagtggcggcgcgtcaaggtttctgcctccccgcccggccggtgggggcacactctgtcgtggctgaacgggtcgtggctggtagtgttcggaggctgcgggcagcaaggtctgctcaacgacgtcttcgtcctcgacctcgacgcccagcagccgacgtggagggaggtcgcgagcgagggccctccgctgccgcggtcctggcacagctcatgtaccctggacggctcgaagctcgtggtctcaggtggctgcgccgagtctggtgtcctcctcagcgacaccttcctcctcgacctcaccaaggagaagcctgcgtggagggagatccctacgtcctggtcgcccccgtcccgcctcggccacaccacgtccgtctacggcgcgaccaagctgttcatgttcggtgggctggcgaagagcggctcgctccggctgcgctccagcgacgcctacacggtggacgtcagcgaggacagcccgcagtggaggcagttggccacgacgaccgggttcccaaacgtcagtccgccgccgaggctcgaccacgtcgcggtgagcctgccctgtggacggatcatcatattcgggggctccatcgcggggctccactcccccgcgcagctgttcctgatcgatcccgcggaggagaagccgatctggaggatcctgaacgtgcctgggcagccccccaagttcgcatgggggcacagcacctgcgtggtcggcggtaccagggtcctggttctcggaggccacactggcgaggaatggatactgaacgagctgcatgagctctgcctggcaagcaggcccgacgaggacggctgatgacttcttttcgttgcacttgcacacatatggttcgttcgtctctctctgttttacgtcctatatatgcgcgctatgtcttgtttgtgtatcatctactttcagtctgttgctgcgtcgtgtcggtccgtcggtatgagaaaaaaaaaagcggaaattgattttttaaaaattagtctggatgagtttagtctattttattgtcattggagaagttctctttcatcggtctaggataagattctatggtctatatgtatgtatattttcatgtctcagaaaacacaaaaaaattattgaaggtccaatgtcttgcaaaaaaaaaaaaaaaaa

SEQ ID NO: 4 - DNA, 2267 bp, Zea mays
acccaaccacggacgcacgccgaggagggagaaagcgggtgtggaggggcgggcggccggcctcgcatgtttgacgacgcgggggccgtggcggtgaagcggatgaggctgtgggaggaggacgaggtggaagtggaggaggaggggatggaggtggacgcggagccgggatggccgtggggaacgccggcggcggggctctccagggctgcggcgatcgtcgtggcggacgcggcggagcccgacttccccgtcatatacgtcaacgccgcattcgagtccgccacggggtaccgcgcccacgaggtgctcgggcgcaactgccgattcctgcaatttcgggatccacgagcccagaggcgacatccccttgttgatcccatggtcgtttcagagatccggcgatgcctcaacgaggggattgaattccatggcgagctgctaaatttccggaaggatggcgctccactttacaacagattaagtctcattccaatgcacggggatgatggctacgtgacacatgtgattggaatccaactattctccgaggcaaacatcgatctcagcagcgtgtcgtatccggtgtacaagcaacagaccaacaacaggcccagcattcaagatctgaactcagcttcccatgagcatgctccgaaagtccagagtgcagaccactgcggtatacttcagttgtcagacgaagttctcgcacacaacattctgtctcgcctgtcacctagagatgtcgcatccattggatccgtctgtaccaggatgcatgagcttaccaagaatgatcacctgaggaagatggtctgccagaacgcgtggggaagggatgccactgtcaagcttgagatgagcaccaagatggtaggatggggccgtcttgcgagagagctaactactcttgaggccgcctcgtggaggaagttcacggttggagggcgcgtcgagccttcccgatgcaacttcagtgcctgtgctgttggtaaccgcttggtccttttcggaggggagggtgtcaacatgcagcctatggacgacacctttgtgcttaacatggaggctgcaaggccggaatggcgccgcgtgaaggtttccgcctccccaccaggccggtgggggcacactctgtcgtggctgaacgggtcatggctggtggtatttgggggctgcggacagcaaggtttgctcaatgatgtcttcgtccttgaccttgacgctcagcagccaacgtggagggaggttgcaagcgagggtcctccactgccacggtcctggcacagctcatgcaccttggatggttcgaagctggtcgtctccggtggctgcaccgagtctggcgttctcctcagcgacaccttcctgcttgacctcaccaaggagaagcctgcgtggagggaaattcccacatcttggtcacccccatcccgcctcggccacaccatgtccgtctacggtacgactaaactgctcatgttcggtgggctggcgaagagcggctcgctccggctgcgctccagcgacgcctacacgatggacgtcggcgaagatagtccgcagtggaggcagctggcgacgaccggattcccaaacgtcggcccaccgccgaggctcgatcacgttgcggtgagcctgccctgtggacggatcatcatattcggtggctccatcgcgggactccactccccggcgcagctgttcctggtcgatccagcagaggagaagccgacgtggaggatcctgaacgttcccggcaaaccccccaagttcgcctgggggcacagcacctgcgtggttggcggcactagggtcctcgtcctcggaggccacaccggggaggagtggatactgaacgagctacatgagctctgcctggcaagcaggcccgacgacgacgacgatgaccgctactgactagtttcgttgcacatggttcatctgttttatatgctatatgctattgttcgtaactacttccagtatgttgttgggtaatcggtatgagaaaaaatagtggaaaattaattaaaaaagttagactagaagattttagtgtattttgttttcatcggagaagtttccttttatcggtctagatagattctatggtctatatatttgtatattttttgtctaaaagatcaaaaaaaactgaaacaactgcattgtagattcgcatggcaaagtcgccagttccaatgtcttgtactcttatttttaatcatatgtaaaatatagcgctgcttcagtttgtaggt

SEQ ID NO: 5 - DNA, 2696 bp, Zea mays
aactctccgtggacggagatgcgaggacgcctgcgaatgaccgcgatccggccggcctgctccagcatgatgatacggaaaaccagcagcagcagcaggcctgctgggagcgcttcctcctcaaggagactctcaacgtcttgcttgtggagagtgatgattcaaccaggcaggtcgtcagtgccctgcttcgttgctgcatgtaccaagttatctctgccgaaaatggccagcaagcatgggcttatcttgaagataagagaaacaacatagatcttgttttgactgaggtttttatgcccggtgtatctggtatttctctgctgagtagaatcatgagccacaatatttgcaagaacattccagtgattatgatgtcttcgagtgatgctatgagtacagtctttaaatgtttgtcaaaaggtgctgttgactttttagtcaagcctatacgtaagaatgaacttaagaacctttggcagcatgtgtggagacaacggtgtcacagttggtagtggaagtgaaagtggcattcagacgcagaagtgtaccaagtcaaaaggtgccaatgaatccggtaacaacagtggtagcaacgacgatgaagctggcatgggacttaatgcaagggatgacagtgataatggcagtggcactcaagcacagaactcatggactaagcttgctgtggagatcgacagtccacaagctatgtctctggaccagttagccgatccagccaatagcacctgtgcacaagtaatccactcaaagtcagagatatgtagccacagatggctaccaggtagcagcaacagaaactgcaagaagcaaaaatacactaatgatgactttaagggaaaagacttggagatagatggtcctggaaatctatatatggatcaccaatcttccccaaatgagagacccatcaaagcagcagatcatgaaaacaattccaaggagtcaatgatgggaaatttaggggatgcaactgttcgagctgctgacctaattggttcaatggccaaaaacatggatgcccaacaggcagcaagagctgcagatacccctaatttctcttctgaagtgccagaagggaaaggtaagaatgatgactttaagggaaaggacttggagataggtggccctagaaatttatatatggatcaccaatcttccccaaatgagagacccatcaaagcagcagatcatgaaaacaactccaaggagtcaatgatagaaaatttagaggagccaactgttcgagctgctgacctaattggttcaatggccaaaaacatggatacccaacaggcagcaagagctgcagaagatacccctaatttctcttccaaagtgccagaagggaaagatggtgccaacgatacagtcaatgacgatgaacagcggaatagtgcattaaggcgatcgaatctctcggcttttacaaggtaccatacatctgcggcttccaatcaaggtgggacaggattggtaggtagctgttcgccgcatgataacagctcggaggctgtgaaaacggattctacttacaacatgaagtcaaattcagatgctgccgcaataaaacaaggctccaacggcagtagcaataacaatgacatgggttccactacaaaggatgttgtgacaaaacccagcacaaataacgagagggtgatgttgccctctgctattaaggctaatggatacacgtcaacattccatcctgtgcagcagtggatggttccagataatgcgacagcagggaaagcgaaggctgatgaagtggccaacaatgcaggcagaaatagtcatcctggtgacgtgcagagcaacctgacgcaacaacatcgtccaacccttcattacgtccattttgagaatagtggatcaggtgccctgcaatgtggttcctccaatgtatttgatcccccacttgaaggccaggctaccaataactatggtgtgaaagccgggagcaactcaggcagcaacaaggggcagaataatgggagtacagctggtgcgagcacggctgctgcaaatgctggacggacagatacagagatacgggctatcgataaaagtggacctggaggtggcagtgggagtggcaatgacacatatgtcagacggcttgctgcgagcatgacaccacgacaagaacagctaaagaaatatagagagaaaaagaaagatcggaactttgggaaaaaggtgcggtaccagagcagaaagaggctagccgaccagcggccaagggttcgtggacagttcgtgaagcaagctgtgcaaaatcaagagggagatggagagagatgaccccccccccccctctggcttcagctcatggttgttagacgtggcggttgatgattcttccttctctggtgtgatctgatatgatcgacaacacaccatccttccttttcttcattggtttcttcacatctagaatttactgcctgaccgggaaaaaataagctaggaacttctatacatgtgtatgcatttctaatcatgtagaagaataagtgtgtcttgactctagataattttaggtagagtcatgctcgctctcctacattatgtgatgtaactgaagtgttgttgtattgtcatgtatggtcttggatcactttctgtcaatatattactagcccacaactactattaaaaaaaaaaaaaaa

SEQ ID NO: 6 - DNA, 2509 bp, Zea mays
ctcctggcagcaaccgaatgtctcccgacgccgacgccgccgccgggggaggaggaggtggagaggcgagcgccggcgccggcgccggcgcgtcgtcgcctcccgcgtccgcgtccgcggcggcgaacggccgggcgctggtgcggtgggaccagatcctgccgcgccgctccctgcgggtgcttctcgtcgagcacgacgactccacgcgccagatcgtcaccgcgctcctccgcaagtgcggctaccgcgtggccgcggtcgcggacgggatgaaggcgtgggaggtcatgcgggagcgtgcctacgacttcgacctcgtcctcaccgaggtcgccatgccctccctctccggcatccagctgctctccaggatcgccgccgccgccgagtgcaagaacatccccgtcatcatgatgtcatcccaagattctattggcacggtgctcaagtgtatgcagaagggtgcggtggacttccttgtgaaaccagtaagaaagaatgagctgggtaacctgtggcaacatgtgtggaggaggcatgcaatgaattgccagacaaatggatcagaaaataatgcagccagcaatcatgtaagtaccaatgttgctaatgggtcaaagacaggagaaaacaatgatgaggaaagtgatgcccaaagctttggtaacaaaagggagactgaaattaagagtgctgagacgttaccagatattcgtagagatgaaatggctggctcatccaaaaaaattgaactacaaaataagtctaatgatggagtaaacacaaaagtggatgcgtcaaaagatagcgatggtgctccaagtgaaagtgagaagaatgtgcgttccaaatgccttaatggtattacttctgcaaaggtggctgagcaaataatggataatgccttgaggatcacggatgcaagttcacgtcgtccaaccaatcttggcaaagatttggctatgactgaaccagcagctgatagaaaatgccaatctttagtgatggaaaataatgctgtcaaagaaaagaaccctggtgaaaagtcgaagagtgctgtaataggtcatgctgattcttacccctcccaatttctcgagaccaacttgggaaaacaacagtatcgtaatggttacaagaatcaagaattcagggaaaaagatatctttaatcactcgaattcttctgccttctcgagatatggcaatagaaggatagaatcatcaggtgagatacagtttcttccttctcgttgcattgttgggcaagagcagcatgttcatggcaaggacccagttttccaacccaatggggtcttgctgcctcccaatgaccataatacaggtgagagtacaaggcaagctcgaattactctggacagtagcatggagggtgctgacatcatttgctccagtagtgctagggaagatgctggtgcaagtagttcttcccatagaaaggacagtatgagccatccctcatatgggtttgtacctgttccaattcctgtcggtgccatgatgccctatcattgtggtgcaattctgcagccagtatactacccacagggtccacttatgcactgtaattcatctgcaatcaacaaggcaacaattcatcaaacctctggccaatctaactaccgtgaagattgtggtagtggtagaccatctcaggttgatgaacacaaacagtcagaggaaaagcaccagttgcatcattcaagacaaattcatcgggaatcaggacaaccagttgacatggttagagctcacatggatcatgctaaccagagtgcaagctgcagccgggatatctgtaaaggaagcggatgcacgggtagcggtgaagccgataccaatgcgaacacgacggttgccctagagagtggcaacgagagtggcatccaaaatagtgacaggtctcaccgagaagctgctttgatgaagttccgcatgaaaaggaaagacagatgcttcgataaaaaggtcaggtatcatagcaggaagaagcttgcggagcagaggccaagagttaaggggcagtttgtaagccagaagctgaaagcagctatggcaacggaagccgaaactgactcgtgacgggcgctagtccagaactgtaattttggttcttcccttcgcgccaggtgtgggcgattggactggtaagtctgaaggctggcaaaagtttttttttcttccttccatggttagcctttctgtacaaaggtgaactccacgtcgggtgtttgttggcatccaagccttattttttgcgaggtacatcaagttgacaaaatgttcggagggatagggtgaaaacggtgcaagcgccatatttcgtccatacgcttaggtgtttgtggagtgtgaaagcagagcctgtacagcatattcaccacccattctgttgccattacaattgtagtaacttgtaattactactatgacaaaagtagacactgttgtagaacttacagccagcaggtcttttccatatggga

SEQ ID NO: 7 - DNA, 2813 bp, Zea mays
gtgtgtgtcagttcgtcgggtaggttggtggcggcgtgagagatgaagagctgcggcgggggaggagcggacgggcagcagtgcccgtgcgactactgcggggaggcggcggcggctctgcactgccgcgcggacgccgcgcgcctctgcgtcgcgtgcgaccgccacgtgcacgccgccaacgcgctttcgcggaagcacgtgcgggcgccgctctgcgcagggtgcgccgcgcgcccggccgccgcgcgcgtctccctcggcgccgacccggcgttcctctgcgcggactgctgcgagggctgcgccgccgcttccgcggcgcgcgtgtcggttgagggcttctcggggtgcccctcggcggccgagctcgccgcgtcatgggggctcgacctccgccgcgcggccgtggccgtgggcgacgacggcgacggcggcgacgacgacgaccccttcctctcggtgctcgactactccgtgctgggggtgggggtggccgacacggacctgcgcgacctctacgtgccgtgcgacccaccgcgggtgcccgtccccgacgccggcgcgcgcccgctcaggggcgaggcgctgtgcgaccagctcgcggagatggcgcggcgcgacgaggcggacacgtcccacgcgcacccgcactcggatctgagcccgcgcacgcctcgccgcacctccgcggcttccagcggacgcctgccgtcgggcaagatggcgccccccgcggcgctgccggtgccggctcatcctcctcccgccgcgccgcaggaggtgcctctgccgtacacgtccctgctcatgatggcgtccgccaactgcagcgacctcattggcggcggcgaccgggtgggtgataccgacgaacaactgctctgggactgcgctgcgccctcggtgccgcccacccagatatgggacttcaatttaggacggtcaaggcatcacgatgagaaatctgctcttgaagttggatacggttctaaccatggcggctttatgattaagagttacagtgacatgcttaaggacatttcttcggggacaacgaaagatctggaagatatttatgactcaagatactgctcaaccgccgaagatatcatgtcctctaatatctgtcagttgtcatcgaaaaatgtaaggtcttctttcccctcccttttccgtaccctaaaggatgcttgcttggtgtgcactgtgcctatccagcacatgtggggaggagttcactgtagtaacagcgtcagctatgtgtcgttaacctgtagccgcccatggtgatagaaaaataagattaattaataatcatggacgtgaaaggcgttacttatcttgcacggaatgtagagttccttattttcttcgtaccattatagctctaaggtgcagaggagcaaagtcaaagagggacaaatacttctctgattaaaggtgtcattcgtatagaatgagcgtcagatcgtcctctagtttgagatctaaaaaaaatactgaaaaccagccgcctgaataggagtagttcttaaagcgcattgcctgaatagttattaaaagcgcttgtatgtttacagaacatacagatgctccacatgtttgatagcttgacgcaccaccacttgctctgctccagtcggcagctagcataacaccagcgtttgctgatgtcgatgcgctacttactgttgaatgcacgcgttcaagcaggcgtgcccataattgggtaccgatcttatctcccaaagggctattcttgtagaagtggactcgatatggtcccatatatatacggtatgaaccctgggccaccgtacgtacacatcctctggtccaccgagtcatggaggcatcttgtctgttttatcaaacattaaaggccggttttgttttgtcgcgtaaaaaaaccgccacatgctcttggtttttgcatcatgccgctcttggtttttttttttggtcctcgtcaggtgagcaccgggagcaacaaacggaaggtgaggtcatgtgctgcgtcgacgatggatggaccaacgacctccgggaaccacaaccacgtacccgcttcagcttcaggtccaggagcagcgctcaccagggagatctccttcggggatcagacggtgtccgcccccgcggccgagaccgagaggcctgccgccgtgaggatcgacagcgagacgcttgcgcagaacagggacagcgccatgcagcggtacagggagaagaagaagaaccgcaggcacggatccatgagctgatcttgatgacccttacctacctagcttgcctgctgcgacttgtgcggtattaagaataggctgttacatgttgtgtcccatcatatcgttcgtgtccgcaggtacgagaagcacatccggtacgagtcgaggaagctgcgggcggacacgaggaagcgggtgaaagggcggttcgtcaagtcgaccgaagcactcaacgccgccagatacaacggatgaggcagccatatatatatatatatatgcatggcctgcgggcggatgagtttgctgcgcgcctgcgttattacgtgcggtagttacctcacggagaggtaggtactgctacctggaggtgctacgtatgtatggcgcggccggaatcgctacgcacgcggcccaagtttaattttgcgttgaagctatagcgatcgtggccattgttgggcagtcaactccagagattgcacggtactgcttgtttgtaacagacgaccctccctttccccttttttctctgttgttgccgtcatccccaccagaacagaaagtatgtagcttacctac

SEQ ID NO: 8 - DNA, 42566 bp, Zea mays
ctgctgcaatgccgactttagtctgagggtacctgttcacacattgtactacagaaatattgttaaatcctgtttttgaggaccttcggacgccgaaggtccccaacagtttgtgttggcatcaatcaccaaaaagggggagattgaaagggaattaggcttacacctagtccctaattttttttggtggttgaattgcccaacacaaatatttggactaactagtttactctagtgcataagttatacaggtgctaaaggttcacacttagccaataaaaagacaaagtattgggttcaaccaaagagcaaaggaacaaccgaaggcacctctggcctggcgcaccggactgtcaggtgtgccactggacatgtccggtgcaccagaggactccgacttcaaactcgtcaccttcgggaaattccagaggcgactccgctataattcaccggactgtccggtgtacaccggacatgtccggtgctccaaagaagagctgcctcaggaactcgtcagcctcgggaaatcggaacgtctgctccgctataattcaccgaacatgtccggtgtacaccggactgtccggtgcatccacggagcaacggctacttcgcaccaacggacacctgcatgcgcatttaatgcgcgccagaagcgcgcagaagtcaggcacgcccatactggcgcaccggacattgaacagtacatgtccggtgtgcaccggacacccaggcgggcccagaagacagaagctccaacggtcggaatccaacggctttggtgacatggctgtcgcaccggacatgtccggtgtgcaccggactgtccggtgcgccatcgagcagacagcctcaccaaacggctagtttggtggttggggctataaatacccccaaccacccaccattcattgcatccaagttttccacttctcaactacttacaagagctctagcattcaattctagacacaccaaagagatcaaatcctctccaaattccacacaacgccctagtgattagagagagagatttgcttgtgttctttcgagctcttgcgcttggattgctttcttctttcttgattctttcattgcgatcaagctcacttgtaattgaggcaagagacaccaaacttgtggtggtccttgtgggaactttgtgttccaagtgattgagaagagaaagctcattcggtccgagggaccgtttgagagagggaagggttgaaagagacccggcctttgtggcctcctcaacggggagtaggtttgagagaaccgaacctcggtaaaacaaatccgcgtgtctcacttcattattcgcttgcgatttgttttgcaccctctctcgcggactctattatatttctaacgctaacccggcttgtagttgtgattatttttgtgaatttcagtttcgccctattcaccccccctctaggcgactttcaggaagagcaaagacttgtcaaaggccgaggcagtcaatctttcatcgtcggagtcagatgaggagcagtcagaaccccactcctttccaagatgtgcctcgcccttcgccttcttgtagtttttcttcttttccttcttcccgtacttttcttgtccctagtcattatcgttatcggggcattgtgctatgaaatgaccagtcttaccgcatttgaagcaggagtgctttccccttgttttattcttggaggggtactctttgcgtcctttgagcgcggtcttgaagcgtttgatgatgagtgccatctcatcttcatttaccccggcagcctcaacttgtgccaccttgcttggtagcgcctccctgttgcttgttgctttgagcgcaatgggctgtggctcgtagacgggtagtggatcgtttagtgcatcgtccacatatcgagcctccttcaccatcatgcgcccgctcacaaattttccaaggatctcctcgggcgtcatcttggtgtacctggggttttcacgaataagattgacaagatgggggtcaataaccgtaaatgacctgagcatgagtcggacgacgccatgatccatccatcttgtgcttccatagcttcgaatcttgttgactagggtcttgagcctgttgtaggtctgagttggctcctctcccttgatcatcgcgaacctccccagcttgccttccactagttctatctttgtgatcatagtgacatcatttccctcatgtgatatcttgagggtatcccagatttgtttggcattgtccaagccactcactttattatactcgtccctgcaaagagatgctaataacacagtagtagcttgggcatttttatggatttgttcattgataatcacagggttatcagtgctatcaaaatgcattccattctctacaatttcccaaatactaggatggagagaaaatagatgactatgcattttatggctccaaaatgagtaatcctctccatcaaagtgtggaggttttccaagaggaacagaaagtagatgtgcatttgaattgtatggaatacggaaataatcaaaagaataattttgattgaccgtcttttcctttgatgaggagtcgtcgtcgtcccttggtgaagaagatgaggcatcgctgtcgtaatagatgatcttcttgatgcactcttcttcttcccatctctcttcttatgacttgagccagagtcggtaggcttgtcgtctcttggctcgttaaagagagactccttctccttatcgttgaccaccattcccttacccttaggatccatctcttcgggcggttagtccctttgatgaagagtacagctccgataccaattgagagcacctagaggggggtgaataggtgatcctataaaattaaaaactaaatagccacaaacttgattatcaaagtgttagtaaaatcaagtggctaaggaacgcgtttgtgagaacaaagcaatcacaataagcaacacatgagacacgcgattttttatcccgtggttcagccaagtaacacttgcctacttccatgttgtggcgtcccaatggacgagggttgcactcaacccctttcaagcgatccaatgatcaacttgaataccacggtcttttcctttagagtattcttctcgtttgcgaggaatctccacaatttggagtctctcgcccttacaatcgagatcacaaagaaagcacagagtaaggttggggagagcaacacacacaagactcaaatccgcagcacaacaacacacacaagtgagaacgtgagcacacaaacacaacgcgagaagtttacaactcgaatagtgctcaaatctcaagaatgatgatccgattgcgtgaaagcaaagtctagatgtcttaggatgtttcttgtaagcttggtattctcctccatgcgcctaggggtctcttttatagccccaaggcagctaggagccgttggaggccaacttggaaggccaaacttgccttctgtcgggtggtgcaccggatagtcactgtagctgtccggtgcgcgatctccttccatatctggcgcatccgaccgttggtcctcggggtcggttggcgcaccggacactgtccggtacacaccggacagtcctgtgtgcccaaccgaccgttgctgcgggccacgcgtcgcccgcggattgcgcagccgaccgttggcgacgttggctcaccggacagtccggtgaattatagcagtacgcctctgcgttttcccgagagcagccggttcaccgtcggccagtctagcgcaccagacactgtccggtgcaccactggacagtccggtgtgcctggccagagttggtgttggctgcacaaagctaactcttctccaatttaattcttcttttcttggtactgtttctagcacttagacaaacacattagtatacaaaataatgtactaagtctaggaacataccttatgctttgatttgcacttttcacacattttgcacataagaactcaattaatgtgttgggcatttaatcaccaaaatacttatagaaatggtccaaaggcacatttccctttcagaaattttatacccccaaattcagggtgttacagtaataagctaactgtattatttttatttgatgatttttatagtgttatataaatgcagaccatctattcgttggtagacacctagaggatatggattatcctgtgaatggaagacattcacaacctagctcagtgcgcactgatgaggctagcttatcggaagccctttattctcgttttgggatttcacaagaaatcataagggtgcataagaaaatgacttcatgtcaactggagaattgtgttatttaaaagctacaagtgtcaacacatacatttgagcaattgtatatgcgctccaagtgatccaaaagactatggccatagcagagcacgagtatgctcaaattggatcttgttgagtgatacaatatggcagagatagccttgctcaccggtaagaagtgttaacttattttcacttcaaggtatattattgtggatacaagtttgttttcatggacttggaaacaatgaggtggtgagaaagcatggctagtagcaactgggtttatacgcaaacccaatcattattctaatactataaattctcctctactatgagtagtaaaattctgatgcaatattatggacaataaatcatctatctatgcagttaataggtgcagtgacaacatatgaatatatgatcactaaattatggtatttgtggagtcttgaaggattccaaatacataatcatcaatcacaaatttgcaatgcttggaaagtctttgtgacttagagcatccaggtcaaatatggtacaatcgacctagtgaatccttcctttcaaagggatacatgaagaatggtatgttcagtgtaaatatgtgcaacatattttatggagttcgagatagaggatatgaattgtaagagattttcaattcaaagtaaactatcttgagtatcttggatacaaagttgtctatatccaacatatattgaagaaattcaatataatggaatcatagttatttgattctttcgcatcatgagatgtgctattgtacattgcaagagcatccgattggatattgctttgcaatgatttgctagctaacagcacatgagatcgagttatgttctctatgagtacttatgatctggttatagttggatatactgatcttggatatctatagaagatcctcaggtacaagatcaatgacatacttctggtaagttggacctactgtttgataaatgatgatcaatagagattaatggtcacttacactaatcattctatagcacacttcgtggaattgtatagaatgatatactacatacataggatatgtggtggtcatgattttctatcactgaccttattatctatgaagataattatactttgtgtggtttagatgaaagacaagttacgaactaagtctctaccttactccacatttttaagtgtgtttgagagtaggtataggatgacttagtgatttgcaaagataagtgggggtttcctcttgatcggaagaacttgtttctacatcatattgtactcatttctttgcatgagtttttcccatgtttgggtttctcattcaaagtttttaacgaggcaacatcaacacaagacctatgtcttatcatctattttttcccgtagaggttttcgaggatgatacattatgacatagctattgttgtatttgaactaggttatgagtttatctccctagagttcaaatagatcaacaatagggtatgaccactctccttatttttcccgttggattttttaggagacttagctgatatgttgatttctcagattttctgataagattatcttggacaaatattagcctgagttatatgtcttatcatttattttccctaagggggttttgagatgatgaatatagacatatcattgttctttgggctagaggtccatgggagagcaatggcataccatggttcaatggaaccaccgataattatctataaggatatttgagcttgtgttgttcagatggaaacatttatattaggagcaacattaataagcatattgctcctaaattgttttatccccatgaacttcagaaaatggagatataaacatcttgcaaacaaagtcttgtgataatcttgctgatctattcacaaaatctctaccatactccatgtttcagaaatgtgtcgagaggattggtatgagaagacttaagcgattgcaagaattagggggagtaattctccatgatatttgactgttttgaaccatcatattatactcttttctttgtatgagttttgccttgttaaggttttcttatccaaagtttttaacgaggtaatatcaactaagctatatgcttcgtcattgatttttttcccatggggtttttaggaatgatgattacaggcatatttttcttttggaaatcagtgcgagttctactcatgatccaaaagacattgtgtactccttatttttcccacaagatttttgatgagataatatattggaagatagctgacagatgatcaaattgactttgattgattaagggggagtgtcacaaaataacatattacaaagttatatgtgatatagtgatcaattcaaggggctcggtgaacacatccccaaaaaacatacctcttgagaatgacccctattatatatatatatatatatatatatatatatatatatatatatatatatatatataagtaagtctttcatgcaataaagtacatacgaactctcatttgtcattctctgcgatctacagcttgttcgctgcggcttgctgcggctgcggcttctacagtatttttctctctatggattgcagctgcagcagtccaaacagctgcaacagtgtcgcttgtagccagccgaacacgcccctagttttttcactgctctctgctgagctcgctggcgtcgccgtaaccgcgaataaagaaaacgccccgccatgtcacgtcctaccgggcagataagccaccagtccaactcgcgggccccacggctccctcgcatcccacaaatccagtcgccacgtgcacgccctccgcaatcacaaaggcccagccccggggccccacccccctggtgcgcttttccgccacaggctctcagaatctttacacccgcacaagcgcccttgccggctcggccccacctggccgcttcgtcagccgcacgatgtgacggggcgcgcatcgccgccgtccaaggcccgcgcgacgctggccactagttcccgcgcggggatcggacggtcgcggctcgggagcgcgggcggatcggacgctcccggtggcgtcgcggggagagggtgacggtggaacggaggtggagaaacggcggccacaggctcgcggcgctcgccggtgccctggaaaaagcgcaaggggagccgctagatcgccgccagttggccgccaggtgggccccgcgtggcgggggcgcaggccagttcgggcgtttcccaaccgcaaattattcattattgtctgtgagtcctgtgaccttttgcgttttgcggaagggtccctgcttaagcctggatttgcacgtggctaccgtgggaggttttctggctgttatttttcggttcaggtaacaggctttgtaaattagtctctgctgattaatcttctctctattctattttctattttataaagtagcagtttacacggttgccgcgcgttaccctttcacttaccgcgtttcaaatctcggttgttggctccacattcacaattacctaaccaaccgaatacatatatttttatgttttactaaaataaaatctactcatgcgatacatagaacaaaaaataagataaaattacgtacaagtagaggttcaaccttgattgttatttccacgttcacacccatctatcaacaaaacccatatttttttgttttattaaaataaaatcttcacatgtgatatataggaactattgtaatatacatgcatctgactattgtttatgtattcttgagatgagaatgctccgagagatagaaacataaatattattagttagttgccgtgaatcccacaatttctatatatgatatatggttcttcgtataatacaagtatacaacccaacgtaacctgtagtggttagaggcaaatactctcttcttatagaccatgcttccaatcaatggacattttttttgatatttctctaagtggggaaggggacggcacacgacaattctggggaccctcactacgcgcgtgggaagggacaacacacacaatggaacttccactttaaggtgtagtgaagagaaattaattttctctattttatgttaactagacacaaatgatacaaatcggacaaaaccaaaaaatgaacttatatgctcaaactagtagctagatagccattctctgtaaacatgacgggtgatcgtacatggaccctcaaactcctgcgctattcagagtgaccctgactataatcctcaagtaagtaccactacacgcactttccaaaagctgagcagcaggatgagcgtgaccaatcttcagcttcagctccttcgcaaatcaagaaccatccatccattttgttccgttagagcgagacaccgacggatgcagaaatggtcgtcagccagcagcaccaccttgccctctgcataaacttaaactattctcgctcaaggctgcaattccggggatgctggagggcgtgctcgcaagatttctggggccggagcgcgagaaatccacaagaaaagatagtggcccagatttctcgcggcgctcgccgcgatcgcgacccgcacaggccacagcctctctcccctctgctcccgcggcccgcgcagcgcacagcatacagcgcaccgagctgcggccaccgcagcgaacagcaaagcacctccgactccaagtcgcgagagccttctcattcgtcttcctcctcttccacccatcctgcctgctcacttccgttccgtagtccagctagatccccgggcaaccgatccaccgagaagcttgtggttgtggcggcggcggagagggaagcgggaggtcggaggtaggcgcggatgccactgttgtgccggcgccggcggggccggtgatgcccgcttgagctgggtgggaatcgggcctcgttttgcgctgcctcgtggcgttccctgtgattactgagcctcctgacgctcgaatgggtgcgcgggttggtgcaggccaccgtgcgtcggaggtggacgagggagcgaggcggcgccagaccgaggttgcgtcgggctcgatttctactgggctgctgtctgctgaggtactgctgcttccctagctagaattcacggacctctgtggctctgttttagtcgacgcgacatgcccggattactacttttttttgcctgccagaaaattacttttcagaatgttctctggtgtgcttttgttattccaatcagatggccattcgcctgttttcattttgttcatcctgggctacgtgttttcgatgcttaatttagcagtggaatgggtcataatctctggtctggtgtacaagctgagaacctgacgagtcgtaacgcacagtagttgtaaatgagttgtgccgctgctcgctgtgtttcttttgcagaggacggcggttgtgatttgttcgtcgtggtatgtgatgggtaactttacggggttgagtgttttcttggtgaggttatggttttagcgttgtgctttaggacgccgagtggatatttgcgttactattcctgctgctgagctatgttgctttagtttctggacatgaacctatatgtttcttgcagacgtgagtctctgatattggttcctggaggcttattgcttccctttgattggaagaactggatcctgtgaactcttaactcggcaaattatttgcaaaaactttcctactggtatatgctagtgttttgaggtctgattgcctgatttgattagcatgactaggacaatgaatagtttgcttgcgaatttttgcaattcatgtttcctttgtcagattgagctggattattttctggcacgtaatcagtcccatatgtgctttcatctcactctagtcaatttgaaatgctttttattgcgttacttgcaaagtttcctaatagattttagtgtcattaggtgcaaaataaagagtgatttcctgctgttcctttagtgtcattattaggggcaacatggagagtgattccttctactctttagagtcattaggggcaaaatgaagagtggttttctaggctcttttagccacattagatatcactagttaggtgttagtgtattgttacagtttctatatatcacataatcagaccttgtttaaatgggataattgtataaacatgttccaaaccattacactgatttgtgctctatttgaactggtcgttgtgcctgatctcaacacgtctaccatgtaacctgcataatgcatttcatatgttgagtgagaaatcataattccattccccgcccggtctcctgtgaattggctcgcgcggcaccaaaccctagccaccgccaccgcttcctcccctccctgccttgtcaccagcagagtaagcagccgaaaggagacatgtacaaacggcctgtccggcctggcccgggcccggtgaagcccgacccgccaggcacgattagaaaattgggtcagaccttccaggctcttgggctcagatctctgcacgggcctggcccgttgtaggcctaaataggccaggtcggcccgataagtacaaaaaagcggaacgattagtgggctaagtgggctagtaagcacgaataagtacaaaaaaaccgggcctagcgggctagacatgtagcggaccggactgggccagcccaacgtgctcatttctctgtgacgggccacaaaaccgagtgggctttcgggcttcttgtacatctatagccgaaagtcccgagcggcttgcgaggatgttggcggcgggtcctcgcgtggcccgacacggtttagcctggctattggagtgaatattcaatggtttagggctaacccaacaggttagctatatagtgtttacatgggccacatgggccaagccttaacaggcctaacactctaacacccccccgcagtctggacgtccggcgcagcggagtacacagattggactcaaaaagaagtacatcacacaataggatccccccacagactcaactagccactactgatgttgaggctggagcgaaactcggcgaaggtcgaggacggaagacccttggtgaagatgtcggcaaactgggaggtggtcgggacgtggaggacccgaacagtaccggcggcgacataatcacggacgaagtgtagatcgatctcgacatgcttggtccgctggtgctgcactgggttggtggagaggtagaccgcgctgacgttgtcgcagtagaccaccgagctcctggagaggggactgtgaagctcggtaaggagctgccggagccaggcagcctccgccacgccgttggccacggcacggtactccgcctctgcactggagcgggaaacgaccggctggcgcttcgacgaccaggacacaaggttgccgcctaagaagacagcgtagccggaggtggagcgccgagtgtctgggcacccggcccagtcagcatcagtgtagacgaccagctcggaggaggtagactggtgaagaagcagtccgtagtcgacggtgccccggaggtaacggaggaggcgcttgagcgccgcaaggtggggctcccgagggtcgtgcatatggaggcagacctgctgcacggcgtaggagatgtccggcctggtgaaggtgaggtactgaagggcaccggcaagactcctgtagccggtggggtccgcgactgggtcacccgtggccgcagagagcttggcctgcgtgtcgacaggggtggagcagggcttgcagtcactcatctgggcccgctccagaatgtcaagtgtatactgtcgctggtgaaggaggagtcctgaggggcgaggctcagcagtgacccccaggaaatggtgaagcacgcccagatctttgaccggaaactcccgctgaagcgcgtcgacgaagcggcgaagaagagacggactggaggcggtgaggacaatgtcatccacgtagagtagcaagtaggcagtctctgcgccatgatggtggacgaacaaagacgtgtcggacttggcctccacgaagcccagtgtcaccaggaaggtagccagtctggaatgccacgcccggggggcctgcttgaggccatagagggacctgttgagccggcagaccatgtcagggcgagaggagtccacgaaccccgcaggctgacagcagtagacggtctcggtgagggcgccgtgcaggaaggcgttcttgacgtcgagctggtgaactggccaggagcgagcgagggccagcgagagcaccgtgcggacggtggccggcttcacaaccgggctgaaggtctcatcgtagtcgactccggggcgctgagtgaagccccgaagaacccagcgagccttgtaccggtccagggtaccatcggcccgtcgcttgtgtgtccagatccacttgccggtgacgacgttggtgccgggcggacggggcaccagatcccacgtctggttggcgacgagcgccgcgtactcctcctccatcgcctgacgctagtgggggtccagcagggcggtgcggacggaggagggtaccggagaaacctgcgagtcggcggtcgtggccgccaagacacggggcggcagggtaccggccgcggtgccgcgtcaccatcgggtggacatgccgcgggtcgcgatgaaaggagcggtggatggtacaccggcgtctcgacacgggccggcgggtggccgcggcggaggtgtaggtgtccctggcggggactgggccaccggcggtgacagcggcaggggcggcgacggtggaggggcgaaccccggcggcggcagccggcgctggtagacccgcaccggctgggcgaagcgggacggaggggtcgtaaccgacggccccggaggcggtgcagtcccaccaccctcgctcggcccgggggcgatcggagacggggcgccgcggagacgcgacaccaccgaacccgagcaaggtaccgggccgggagtaggaccgacaggtggtgagcgagtacctgcagagagaggaaggagaggtggctcgaccaccgtgtcagtctgaaagagagtgaagaggtcaaggtcagggtcggaggagggtggtgtggtggtggaggagtagggaaatacggactcatcaaacaccacatggcgagagatgaggacccggcgagagcagaggtcaaagcagcagtagcctttgtggtccggggagtacccgagaaacacacagagggtggaacggggtgctagtttgtgaggagcagtggcagcggtgttcgggtagcaagcacacccgaagacacggaggtggtcatagcgcggaggggtaccgaagagtgcctggtgaggagtgggggccgggcacgcagtggaagggagacggttgagtaggtaggtagaggtgtggagggcctcgacccagaaacaagccggaaggtgcgcctggagaagaagagtgcggatggtgtcgttggtcgtgcgaatcatgcgctcagccttgccgttctgggaggaggtatacgggcaagacatccgcaattgcatcccgtgggagagaaagaagtcgcgggaggtggagttatcgaactcccgaccattgtcacactgaacggccttaatggtgaggccgaactgagtggacacccaggcgaagaagtggcggagggcggggaaagtctcagacttggcacgcaaaggaaaagtccacacataatgagaaaagtcatcaagcaccacaagatagtatttgtagcctgacatactggtaataggtgaagtccacaaatcgcagtgtacaagatcaaatgcatgagtagcatgagaggaagaagaagaaaaaggaagacgaacatgacggcctaactggcacgcatgacaaagatgctcatcatgggatctagtacatgggatagtgacactacgagtaagctgcatcaaggcgtcgcgtccggggtgaccaaggcgacgatgccaggtggtagaagacgtggcggcagcaaaaacagcagctgtgtcaggtgacgaagacgaagaagatgtggtgtacggaagccgaagggtgtagagggggccggtgctgtcacatctgaggagggggcgtcgagttgccgagtccttcacagtaagaccaaaagagtcaaactcgacagaacaagaattatcagcagtaaatcgacgaatagaaagaagattgtggaccaaagaaggagcgacaagaacatcgggaacgcgaaaagagccgggagggccggcggcacccacagatgtgacaggaagacacgagccattcgccaccatgatggacgaggggagagaggaagaaggagggcgaacagaggtgagtataccagggtcgggggtggtgtggtaggtagcaccggtgtccgcgatccactcgggacccatcggcggagtcagagtaggagtctggaaggcagccagggcggccgcgtcccaaccaaccagcccggacggtggagaagccggaggcgtgggccacgacgaaacggcaggtgtcgaggtccagggcgacggagaggcgaacccaacaggttagctccatcaaccccttgtatagtgtgacaacgtcagcgttgtatacatctccatcaaccccatccaacaccaacgcacgaagcacgttgagatcgatctccacttcgtccgtgagcgtgtggctgtcggcgacattcgtgttcatcatgttccgacgcactcacaatttgtcgacatcttcaccaagggtcttccctcctcgctattctcggatttccagtccagtttcaacatctgtcgtagttagagtttcgaccgtgaggggtgttagactcttgtttatatgtgtgttacgggcctagagcctaatccattaggggtaacttttctgatgctatttatgcaacccatgaatttagggtttctaattctgcaacactacaactacactaataggcaactcaaggaaaacaaccacgtagtcaaacttagtacattagtttagcatgactatttataagtcaaataaaataggaaaaaggctattttatgaccaccaactattcgttgtatctgtttaactccccacaataacaacaagaaataaagagaattgagagaaaaaagttggttgttcctttgagggattgggggtgatttttcgcaattgagaaaaaatagggaaagggaattggaaaggaaatctagagtttttttgcatctagagttctagaccccattatcattggttaaagggaaacatgtcacttattctcaatctagtggagatgttcttagggagcacctgggtgagtggcgtctcaactcccaacttaaggctctaccaagtaccaacggagcaagttcttagggagcacctgggtgagtggcgtctcaactctcaacttaaggctctaccaagtaccaacagagcaagttcttagagagcacctgggtgacaaaaaaccaagaatggttcaatgcaaaagaaatgtaaaatcgatgtaggcgaattgctccctctggcccaataaagtgtcgttttgacatcatcattgtaaaacacaactctaaccattgtttcctatcataatagattcatatacatagaaaaattatatcgtctatgaagcttagtttgagataaattggaacatcattttgcaagttcagtctcaacagtgaaaggcaataataatcaaagtttagttgtgcccatcccaaaacgatactacatagctaaagggtttaccatgcgtttgggatcttacgtggatcacaaattcatgttgcaaattaatagttcaagaacctactacctacatgacacatatgctgctatggcattcattttgagataaatggacacatcattttgtatgttcaaactcaacactaaaaggtatctattatcaaagtttataggtttggttgcacccattccaaaatgacattctgtagcgactagtgggtgtaaacacagtagccatcttcatagatcaatccattaacgtctccaaaatcaaagtagtgaatattcaatggtttagggctaacccaacaggttagctatatagtgtttacatgggctctgataccatattggagtgaatattcaatggtttagggctaacccaacaggttagctatatagtgtttacatgggccacatgggccaagccttaacaggcctaacactctaacactggcccatcatcgatcgggtccgtgctaggccggtcttacccattgtccaccgggaccgtgtcgtcaagcttgatcatcgtgccatgcctgggtcttaggtgtggcatggcgggcatggcttgacatgacccaattttattgttgctatttttcataaaaaatacgtatattctgcttgagtatagagtataaaataccaaaaacatgtgcgttttgttggctgagatgagtgtgaatgtgtgtttagagccaacaagcatggtttaccatttgccccgcgagggatcagggagaggtgcatagggagggtgatgcacgtagaaactcctgcattatagcatcagagattagtaatcaaattagtagacactcatagtggtaagaaaaggaaaagtgaaacattattctcacatttatttgttgggagaaactatttgatctagtcgtttcagtaattccattgaggtcgttctagaaggtacttttatttctctaagatttgattttggagacgttaatggattgatctatgaagatggctactgtgtttacacccactagtcgctacagaatgtcattttggaatgggtgcaaccaaacctataaactttgataatagataccttttagtgttgagtttgaacatacaaaatgatgtgtccatttatctcaaaatgaatgccatagcagcatatgtgtcatgtaggtagtaggttcttgaactattaatttgcaacatgaatttgtgatccacgtaagatcccaaacgcatggtaaaccctttagctatgtagtatcgttttgggatgggcacaactaaactttgattattattgcctttcactgttgagactgaacttgcaaaatgatgttccaatttatctcaaactaagcttcatagacgatataatttttctatgtatatgaatctattatgataggaaacaatggttagagttgtgttttacaatgatgatgtcaaaacgacactttattgggccagagggagcaattcgcctacatcgattttacatttcttttgcattgaaccattcttggttttttgtcacccaggtgctctctaagaacttgctctgttggtacttggtagagccttaagttgagagttgagacgccactcacccaggtgctccctaagaacttgctccgttggtacttggtagagccttaagttgggagttgagacgccactcacccaggtgctccctaagaacatctccactagattgagaataagtgacatgtttccctttaaccaatgataatggggtctagaactctagatgcaaaaaaactctagatttcctttccaattccctttccctattttttctcaattgcgaaaaatcacccccaatccctcaaaggaacaaccaacttttttctctcaattctctttatttcttgttgttattgtggggagttaaacagatacaacgaatagttggtggtcataaaatagcctttttcctattttatttgacttataaatagtcatgctaaactaatgtactaagtttgactacgtggttgttttccttgagttgcctattagtgtaggtgtagtgttgcagaattagaaaccctaaattcatgggttgcataaatagcatcagaaaagttacccctaatggattaggctctaggcccgtaacacacatataaacaagagtctaacacccctcacggtcgaaactctaactacgacagatgttgaaactggactggaaatccgagaatagcgaggagggaagacccttggtgaagatgtcgacaaattgtgagtgcgtcggaacatgatgaacacgaatgtcgccgacagccacacgctcacggacgaagtggagatcgatctcaacgtgcttcgtgcgttggtgttggatggggttgatggagatgtatacaacgctgacgttgtcacactatacaaggggttgatggagaggtatacaacgcttaccatgcttaacagtccactcttcgataaggactcatctaagcgaagtactggaacttcttagttcatttaaactcagttgtattgtttttcattttttaatgtttcgagagtgcagctattattttatatgccaataagtacacaactattttaaatatagtgcctttttatcatgaactgtgatcaagggttgagatttgattgggagtaggcacttattataccctttctttttgttctggcagtttacggaagtgtttggccctagaaggtgcgcttgatctcttcttctgatagcgctttacatcttgtgcatgcttttgattggttttatgaatctaatccatttgttttcttggaatggttgcataatttgaaaacttgcgagttttaatatgattctagagttgaagataaggagtggagctaggtttaaactctggtgacttggttgttgcgtgcaacgaatcaactatgctgagtttttctgtaggtaagtgaaatgttggtgatcctaggattttcatttgaagtaactcctgtaattatgttaatatactctacttaattgtgtcatggaccttcggtccatggggatagctgtcttctccggcgaggttatacccctctgccgcaggcttggttctagggtagcagccctaggcgcttgagagggtcattgcaagggagagagattggtttgataatgatctttgcttgatttattccctgttgccatgtggcttataaatagccctatggctaaccaacttctcctacaaactctcaactaactcctactttcttggacttatctgctgctaaccaactctccacaattctctcatctcaatcttattctctagccttatcctagctcatctcaatcttgttctctagccttatcccagcctggctgttgcctctcgctccctatgatgcccatgacatctccccctcccttgaggaccagctcgtcctcgagctgccatagacttacctgacacgacttaaggttaagccttttacatctcggcttacctttattatttaagacgaaaatacaaaataattgtggaactaaaatataaatttgaactgtagctatgtcctcctgtcctcctggatcccaaggaaagagctgaactgcggacttcacgttggatgaaaggtgaaggaggaaccggcccgttcttatgttgggtctgtccagcaccaaggcagttgcccgaatgaaggagacgaccctctttggccgtgcagggggattgcatacccagatcttgacttctgcaggggattcaaaaagtatagacgagacctggtggttgggcgcgcaggctgcgagttggtgcagcgatgagctgatcagcaagtgcagcttccgcaccgcccgcctaacaaggaagccgcgcactgcggcttgcaggcgcaccacggcctgctcatgtgatgacggccatggggtggccctggaggccacagcaaggtgcttctccccacgaagggactgtacctggcggcgtgccaggaaccctcgcgctgccgcctgaagccgcaccgctgcttggagttccttctctgtcttctccttgtagcggtggaacatcacaacgaattgatcccacttctcttcgagccgagtgaatgcatctagagttggagagggcgggtgggagggcgttgcggcggcaaaatggcgcggcggctggtggtggtgagggatgggcggctggtggtggtgaggataacctggagctgataccaggtgtcatggaccttcggtccatgggatagctgtcttctccggcgaggttatacccctctgccgcaggcttggttctagggtagcagccctaggcgcttgagagggtcattgcaagggagagattggtttgataatgatcttgcttgatttattccctgctgccatgcggcttataaatagccctatgactaaccaacttctcctacaaactctcaactaactcctactttcttggacttatctgatgctaaccaactctccataattctctcatttcaatcttattctctaaccttatcccagctcatctcaatcttattctctagccttatcccagcctggctgttgcctctcgctccctattatgcccatgacatcgtgtcatggaccttcggtccatgggatagctgtcttctccggcgaggttatacccctctgccgcaggcttggttctagggtagcagccctaggcgcttgagagggtcattgcaagggagagattggtttgataatgatcttgcttgatttattccctgctgccatgcggcttataaatagccctatgactaaccaacttctcctacaaactctcaactaactcctactttcttggacttatctgatgctaaccaactctccacaattctctcatttcaatcttattctctaaccttatcccagctcatctcaatcttattctctagccttatcccagcctggctgttgcctctcgctccctattatgcccatgacatctccccctcccttgaggaccagctcgtcctcgagctgccatagacttacctgacacgacttaaggttaagccttttacatctcggcttacctttattatttaagacgaaaatacaaaataattatggaactaaaatataaatttgaactgcagtatgtcctcctgtcctcctggatcccaaggaaagagctgaactgcggacttcacgttggatgaaaggtgaaggaggaaccagcccgttcttatgttgggtctgtccagcaccaaggcagttgctcgaatgaaggagacgaccctctttggccgtgcaggggggctgcatacccagatcttgacttctgcagggggttcaaaaagtatagacgagacctgttggttgggcgcgcaggctgcgagttggtgcagcgatgagctgatcagcaagtgcagcttccgcaccgcccgcctaacaaggaagccgcgcactgcagcttgcaggcgcaccacgacctgctcatgtgatgacggccatggggtggccctggaggccacagcaaggtgcttctccccacgaagggactgtacctggcggcgtgccaggaaccctcgcgctgccgcttgaagccgcaccgctgcttggagttccttctctgtcttctccttgtagcggtggaacatcacaacgaattgatcccacttctcttcgagtcgagtgaatgcatctggagttggagagggcgggtgggagggcgttgcggcggcagatggcgcggcgactggtggtggtgagggatgggcggctggtggtggtgaggataacctggagctgataccaggtgtcatggaccttcggtccatggggatagctgtcttctccggcgaggttatacccctctgccgcaggcttggttctagggtagcagccctaggcgcttgagagggtcattgcaagggagagagattggtttgataatgatctttgcttgatttattctctgttgccatgtggcttataaatagccctatggctaaccaacttctcctacaaactttcaactaactcctactttcttggacttatctgctgctaaccaactctccacaattctctcatttcaatcttattctctaaccttatcccagctcatctcaatcttattctctagccttatcccagcctggctgttgcctctcgctccctattatgcccatgacaattgacagtgcctgattttatgtacatgatagtttctacttgcgagtgaatatatctatatacatatacacaaaaggaactctgaatttcatgtatagaattttgagggctccaacagttgacttttgtgtccatcagatttatgctttagtgatggtgcatagaggtcagaaaaatccatatattttaaggttttctaaaacctgatcttttcatttacgatcaatttatattggaattaagttactttaaactagagttgcattcagtttttttgggtacaaagtatgacctatagatcttaaattttgtggctggaaaatagggcgttaggagccctataacatccatgtgttgtatagacactccaaaaataatgcagttatgtagaaatttacatttcaatggaagcacatgaatattgaaatgattttgctctatcttaatgtttttatgcagagtaacagaaattggatcaattcaagtagatgagtgtaattgatccttttgaagattctgatcccagattaattcacgactagagttgtgaactctataggttttcttgtgtaaatttaacactaatttggctgctctttgggtctgggggcacaaatttgaaatattgggagtgctggtgtgatatagaggtctaggaggagatatgaggtactacttgcgtcaggtccagcgtttggttggagatatggaaggaggagctctcttgtttatagacgacctcaactccaagtgacaaagcgaacagctgttgaacgtttcccttctatttctgtttctttttgccggatttggagatggaggtgaattcctctggcgaggaaactgtggtaaaggtgagttgttatataatgtgcttgttgattctggtaaagaaggaacattttatcattgttctttgtaggtaagaaagccgtacacaataacgaagcagcgggagcggtggacagaggctgaacacaaacggttccttgaagccttgaaactttatggcagagcatggcagcgcatagaaggtaaaatctctaccgtttgtttcgttggaattgaattccattcttataatcataatttagacacaaactaattaagttaatatatttgtatattatcctaaatcatatgagagagatagttatacactacacttatgctatagagaagcaagtagaagagtatgttataagttatacattagaaaaatatcatgtaaaactatagaatcaatttccatctcttaccctatgaatttgatatggacttatatataaacttgggaaacttgtggaatgttacattctaaaaaatagcctactccattagttagattccaattcttaaaatgaagggaaacaaacggagcctaagcgattatatccaagtagttttatgctattgttttctgacttcatcaatctgtaaccactgaggtttattcatgtcgatttagtttgctttatactgattgcactttgttttgtttgtttggcttctgagttgctccatagagcatgttgggacaaagacagccgtgcagatcagaagtcacgctcaaaagttcttcactaaggttgtttctctatctgattggctagtgcccttgtttggttcagcgctgttaccctagcattctagttgcattgtcttcatatttgctgataacgtgaatgacttttgttctaatttcctgatttgtagtgtctttacattactgcattatagataaggtacaggggaatgtcaaacttgaagccaaaaaaccttggtttagctgtgaattcatgtctttgctaaatggaattaaactgttatagtttcggggctaatccatgtgtaattacttgcataccctcagtgtaatgggcttggcccaattactcagtatatatatgcactcatatatatatatatatatatatatatatatatatatatatatatatatatatatatatatatatacactcccaacctagttagggttagggtttcccattccaacttccagttcctctctcttctcccttccctctccctccccacagccaccggcgtcgctggcccgtcgctggccgttcctctcctcctccctcactgtctcccacgagctcctgcgccttgccccgccggatctgcgcctgtggtgcacgcgcgccgtcggtcggcgccgtcagacccagcagtccgcgtgctcccttcactccggtcgccgccatccccggtcgacatctcctgcgtggcctgccgccggccggcctcccctgtgtggcccgccccggccgcccacctctccggcgggtcctttcggcgcacccaggacgcaccgaccaggggggttgcgtcctccttgcgtggcctgccgccggtcggccttccctgcgtggctcgccctcggtcgccctcctctccggtaggtccttcctgcgtgcccaacaccttgcgcgggctctcctccgtcaccgcgccgtcgtccctcctgccatgggcttggtcacgctgttcggccaccatcctcatcctgctgttgaccccctcaccagcatccttgcatctccctctccacctcttggcccctcggtccagcagcccctccctgtgttgccctgcaacaacggtgcaacctctacctgtcgcggcggcgcgatccccgccctctcgctcgctagggccctcggctccacttccatggtcgcgcctccgtttccctcacatgtagcccctgcggctcccgctttactgaccccctttccctctactcttccaccgtacgccgccgctccatgcacttcctacggtatcccaccacccttggtgcctctagctccgcttaattccgcgtagtcgttgtgtgtgtcctccttcacgacggccaccttgtccggggtattttcgtgtccttcgatcaggccatgaaccatgttctccatgactgcatcaagctccacccccaggccgaccgtcatgtacccggacccattgtcttcctccgtgccgcaatcgcctccctggcaatcgagcctcagttgtccccctcctctcctagtggccctgtcggagcacctcccgtggccctttacgcacgcctcgtggcctcaccaccctctccctctcccaccgactgagtggtcgactccggagcctccttccgcaccactccgaccactagctcgttattccaccctcatccaccacacaccctcaccctccctctatcgttgtgggcaacggttccaccctcccggtcacctcagtaggtgcatcggttcttctgggaccattctatcttaacgacgtccttgttgcttccagtccgactcgtccccttctctcggttcgtcgcttcactagtgacaatcattgtcctatggagttcgatccctggggctcaccatacaccacctttcaatgcgtgctgtgctcggtcgctgtgatagctccggccccttctactctcttcacttgccctccacttcccccgccagcgtaccctcatcacatgctcctgctactaccaccacatcacatgctcttgctactaccacaacctccgtcgtttggcatcgtcgcctcaggcaccctggacctgacgtgatgtcctagctttccagccgctcaaacatctcctatactcgggctcctctgagcgcctctgtcatgattgtcagctcggccgtcactctcgtcttcctttttccacttccacgtccagggttgttcagacatttgatctttgtccactgtgatctctgaacttctcctgtcctcagcctctctagttacaaatactatctggtcattctggacgactactcccattttctttggactttccctattcggctgaagtctgacacgttcaccaccctcacccacttctttgcttgggtctccacccagttctgtcgccggttcgtgccctccagtctgataatggccgcgagttcgacaacaacgcctctcgatccttcttctagtcttcctcactcatggcgtccagttgcttctctcgtgcccctacacctctccccagaacggtcgggtcgaacacatcattcgcaccaccaccaacatgatccgctgccttctcttccaggcgtctctccctgccagctactgggcagaggccctgcacaccgctacacatctcctcaactgcctcccctcgaaggcggtgagccaccccactccccactttgccctatatggcacaaccccctcctacaaccaccttcacgcgttcggctgtgcctgctatcccaacacttccgccaccgctccccacaagctatttccttgctccactcgttgcctcttcctttgctactcccctgaccacaaggggtatcactatcttgacctcgcctcccaccgcatcatctctcgtcacgtcgtttttgatgaagatgtgtttccccttgttggctcctccccacccactgatctcgactctctccttgagtccgatccggttccccctccacaccaggcgtcctgccttgcgccattgcccgcacctcgtgcggcctccacgccttcgctcgcatctattcccgcgccacgcgcggcctcgtcgaccccgcctgcgccacgcgtagccttgtcgaccacgcctgcgccacacgcggccccgtcgaccacacttgcgccattcgtgaccccgtcgacgaccgcgagacgttttgtcgaccccgccttcgtctaccaccgccgcgggcgcgctactccctcagcgcccactgacctgggcccgtcgaaaaacgcgggtcgcttcgtcgaccctgccgtcgtctatcaccgacacgagcaggccatgcccacggctcccgacgttccgattgcctgctctaagccacctgtgtaccacccggtcgccatccaccacgacccgggcacgtccacccaatggtgactcggcgcgccgctggcgttctccgcccgactgatcctggcggctgacacgactgccactccttcggacgcctcctcggtctcctcctccgttcgcgccgtcctcgccgacccccactggcgccgcgctatggaggagtacgcggccctgctggccaacccacacttgggacctggtgccgtgtcccccaggcactaacgtggtcaccgacaagtggctctttcgccacaagctgaccttggacagctccctcgactgttacaaggcccgttgggtccttcggtgcttcacccaacgccccgtagtggacttcgacgagaccttcaaccccatcgtcaagttcgccaaatttgccacagttcgcgctgtcctctccctctccctctcccgggattgggtgatccatcagctcgacgtcaagaatgccttcctccacgacactctgacagagactgtctattgcagctagcccaccggcttcgtcgatgccgctcgtccggatctggtctgtcggctgaaccattccctatacggcctcaagcaggctccgcgggcatggtacggtcgcttggcctcctacttgaccttcatcggcttcgtcgaggccaagtcggacacttccctgttcatctaccagcgcggcgacgacaccgtctacctcctgctctacgtcgacgacactgtgctcatggcatctaccgccgacctcctacaacacgcgatcgtcgcgcttcagcgggaattcgtgatgaaggacctgggcccctccaccacttcctcggcatcaccgccgagcgccagcctcagggtctcttcctcctccagcgccagtacgccatcgacatcctggagtgggttggcatgttcgactgcaagccctgctcgacgcccgttgacactcaggcgaagctctttgaggatgacagcccccggtcaccgacacgacgtcttaccggagcctgaccagcgccctccagtacctgaccttctccaggcccgacattgcctacgccatgcctgcatatgcacactccgcgggagccccatctcaagcagatcctacgttacctccgcggctcccttgactacgaccttctactccgaccctccccgacgtcggagctcgtggtctacatcgacactgactgggctggctgtcccgacacgcgtcgatccacttccggttatgcagtgttcttgggcaccaacctcatttcatgggccaccaagcggcagcccgtcgtcccccgctccagcgcggaggccgagtaccgcgctgtggccaacggcgtggcagagtcctcttggctccgccagcttctccacgagctccacagcccctctccaccaatccagtgcagcatcagcgcacgaagcacgtggagatcgacctgcactttgtccgcgagcgggtcgccgccggtgatgttcgggttcttaggctctcagcatccccaccacgctgcaattctccgtcatcttcaccaaggggttgtcgtcgagtgtcttcgccgattttcgatccagtatcaacatctgtgcaggatagagttgagactacggagggggggggtgtttgagtattgttagggtttcggggctagtccctgtgtagttacttgcataccctcagtgtaatgggattggcccaattactcagtatatatatatgcactcccaacccagttagggctagtttggaaactcaaacccacttcgggattgaaggggattggaggggaaattagtttatttccacctcaatcccctccaatcccgaagggggtttgaggtttccaaagtagcccttagggttagggtttcccattccaacttggtaccagagctagttcctctcttttctcccttccctctccctccccacagccagcggcgtcgctggcccgtcaccggccattcctctcctcctccctcaccggctcccacgagctcctgcgccttgccccgccggatccgcgcctccctttccaacttaaactattccatttattgtagagaaacagggttgagggcaattggccacacctcaatgagaggttatatagagctggctggcctgctttacaaggcagggataattctcctgatttatccctgatttacatctgctatatctagcaactaatccctgatttacatctgctatctatagcagctaggattccatccctgatttacatctgctatctatagcagctaggatatccacagatggcatattctattgcctaacacccgcccgcagtcgcagcgggaggctcccggacgcaaagactggatcgaaattctcgaaagagtgctgtcggaagccctttagtcatgatgtcgacgaactggtgagagcagggcacatggagaacccggatttcaccaagggccaccttttcgcggacgaagtgaatgtcgatctcgatgtgcttcgttcgcttgtggtggacggggttggccgtcatgtagacggcgctgacattgtcgcagaagacaactgtggcagaaggcagctggatgtgtagctcctggagaggtggatcgtcgagagtctaggtagcctgcccagtcggcgtcagagtaggcagtcagcttggtgacagacctggtgccaatgtgaagacccgaggagagagtcccctggacgaagcgtaagatgcgcttgacgagcgcacggtgaggctcgcgcggggcgtgcatgaagaggcacacctgctgaacagcatatgccagatcaggacgagtcaacgttgtaagtagagggactctaactcccatcaagaggatgacactatgagttggggcaattttctgtttatttcttcaaacactacacaatgccatacccttagaggggttggggacacatatttatagccctaggggctgcactaccacaccttctcacacacactacacaacaggattgtcctctagatgctaaagagactacagaggacagtcaaaaagcgactgttgtcctctagatgctaaagcgactacagaggacagtcaaaaagcgactgctgtcctctagatgctaaagagactacagaggacagtcaagttgtcctctagatgctaaaggactacagaggacaatcaaaagcaggctgtcctctagatgctcaagacttattccatcattctccccctaagtcttgggcgtcgtcttgtgagaaaattgggccatcccggacctggagcaaagctcaacaaacttgatcttcccaaggggcttggtgagcaggtctgcaagctgatccttggtattgatgtagcgcgccttgatgctcccttctgccaagcagtctcggatgaagtggtatctcagccggatgtgcttgctccgttcatggaacacggggttcttggccaatgccagagcggactggctgtccaccctgagttccaccgctccagtgtctctcccgaggagatcaccgagcagtcgagccagccagagagcctgagtcgaagcagtggacgccgctatgtactcggcctcgcagctggacatggccaccacctgctgcttgaccgactgccagctgatggggcacttgccgaggaagaagaggatcccgcttgtgctcttgctggtgtcgatgtcgccggcgtggtcgctatcgctgtacccgacaaggtgtgcctccccagggcacctcgggtagtagagaccgtggtcgagagtccccgcaacatagcggatgatcctcttcacagcctgctcatgctccgtcgtcggtcgctgcaagaatcgactaacgtagccaacagagtatgccaagtcaggtcgtgtgtggacgaggtagcgaaggctccccacaagacgccggtaatgtgtagcatccacctcctccgtcgtgctgtcgcgactcagcttcagcctctcctccatcggagtgagagctgggttgcagtcggtgagcccagccagctcaacaatgtgcttggcgtaggcggtctggcgaagtgtgatcccggagtctccctggtgcacctcaatccccaggtagaaggagagatgccccaggtcactcatttggaaggtggccttcatctcttccttgaacgctgccacctctgcatccttggcgccggtgatcaccaagtcgtcgacgtagacacccaccagcagggcacttcctccattgccccgccgatagatggccgcctcgtgcgggcttggcgtgaaacccattcctttgagcgtggaatccagcttgacattccacgccctcggtgcctgtcgcaggccatagagagccttgcgcaggcgcaacaccttgccctccttgccagggatcgcaaaacctggcggctgctgtacgtagacctcctcctttaagtcgccgttaagaaacgccgacttggcatccatgtgatgaacgtgccagccctgctgggctgacagcgcaaggaggagtcgcacggattccatccgtgccacgggggcgaaagcatcgtcgaaagtcgatcccctcctgctgtaggaaaccgcgtgccaccaagcgagccttgtgcttgacgatggcgccggcttcatccctcttcagtttgaacacccatttaagggtgatcgcgcgatgaccaggagggagatcagcgagctcccaggtgcggttcgtctcaaccgcgtccatctccgactgcatcgcggcacgccaagccgcatgtttctcggcctccgcgaaagaccgaggctcaccatcgtcgcatgcaagatgcaactctcctgccagaatgcgagatgcagggcctggcaccgacgggtcgatgagaagaccctccacccttcgataccgcaacggctcgccgtcgtagcacgcgtcgacgcgctcctcgtcgcgagacagaggggtcacgagctccaccgggtcgtgctcgacacgagctggtgtcgaagaggacgttcccggagagggtaccgtcggtgctggagtacgtggtggcgaagagcttgctgtagccggagtcgtggctggagtgcgtggtggtgaagagctcgttgtagcaggagctggagagtttggcgctggagtcgatggagacttgggggctggggtagacctgctcggagaagagttgcctactcccccagctccctcaaagtggacgtactcgatggtgaagtcgtacgtcggagtcgtgccgtcgtccaccgccttgtcccacgcccatcctcgcccttcgtcgaacactacatcgcgcgccgtgcgcacacgctgtgttcttgggtcaaggatgcggtaggccttcgagcccttcgcgtagccaatgaacacccccggggtgctcctatcgtcgagcttgctgatgtggccaagctccttggtgaacgcgaggcagccgaagacccgtaggtgagagaccgccggcttgcgcccatgccaagcctcgtacggtgtcatcccgttgagagccttggtgggcgagcggttgaggatgtaaaccgctgtcaccaccgcctctccccagaagacagctggcattcctctctgcttgaggagagcccgagccatccccacaaccgtctggttgcgccgctcgacgacgccgttctgctgcgggctgtacggcgcggagtagtggcgctgaacgccctcatccgcgcagtacgacgcgaactcagccgccgtgaattcgccgccgttgtcggtgcgcagcacgcgcagcttgcggccgcactccgcctccgcagcgacctgcacacgcctgatggcgttcgcagcctctcccttgctgccaaggatcatcacccacatatagcgggagagatcgtcgacgagcaacaagaagtagcgtcgtcctcctggtgtggctggtgtcaccgggccacacaagtccccatgcacgagctcgagcctctccttggctcggaagctcgactgctggggaaaggggagccgtctctgctttgtcaacacgcagacatcgcagaattgctccacatggtcaaggcacggcaggcctcgtaccatctccttggcactgagccgcttcagggcctcgaagttaaggtgcccgaagcgctcgtgccactgccatgccccgtcgtctcgacgagcagcaaggcagcaaggttgtgccaccttcacattgaggatgtatagccgatttggactcctgcgtaccttggcaagaaagcgacgagagggatcccagatcctcatgactccgtgctcgatctccacgcgcgaaccgttctcatccagctgtcccaagctgatgatagagttcctcaacgcggggatgtagtagactccggtgagcagcctgtgctcaccagacgcggcggtgaagacgactgagccggcgcccttgatctctacgccggaggcatccccaaacttgacggagcctcggacgctagagtcaagctcggtgaagaactcccgtcggccggtcatgtgatgagtggcgccggtgtcgaggcaccatccctcgatcatgttcttgttggagccgtcgccgaggaaagcgcgtgctttcgactcatcaaggtggaggagtgccgctggagatggctcgatgcttgcatgtgccaggagcagggcctcctcctccgcctccgcctgtgcgacgttggcctggccacgtcgtggctgccgacagtccctggcccagtggccaagcttgccgcagttgtgacagccgtcgtctcgtgccggcttcttgttgccgacggcgccgccttgggcacctccacgtgcaccaccctcagcatgtcctcgcgccccggcctgggcgcctccacgcgccttgcgcggcttgccgtgtttgcggcctcgtgtcgaggaggactcccccttcttcttgtcaccctggcaggcctcccactgctcccgagtgagatgtagcttcccgccgatagtgataggcccagagagagcctgtggttcgtcgccgtcgaccaccttgaggcgaccaatcgcctcttcgatcgtcatcgtggagaggtctagcagagactcgatcgagcgagcaatctgcttgtacttctcggggatgcaacagaagagcttctcaacagctctctcctcatcgtaggtgtcgtcgccgaactgcaccatcttctgcaacagagtgttgaggcggagagcaaagtcatcaacatcctcacctggcttgaaggccaggttctcccactccttgcgaagtgcctgcagtgtggtcttgcgggcgcgatcgctgccgatgcgggtcgcagcgatggcgtcccaggcctccttggcagtccgcttctgggaaagcgaaaactgcatctcgggcgggactgcaacaatgagggcatccagcgcccgccgatcctcgtggtagtcgacgtcgtcgtaacgaactgcttcccacatgtggcgaacctggagccgtaccctcatcaccgcggcccactcgacgtagttggtcttggtgagggtaggccacccaccgccgggaccgatgtccctgacaatggcctgggccatgcggcgaccatggtaccgatccggggagggagaaccgcgccgcctgtagaggccgcgatctccgtcgactcggtcgccgccgccgggagcaccgccggcgcgtctacgcccgtctgggctgccgccgcgtgcgcccccgcctggagcgccgtcagcgcgtcggcgcctatccgggctgccgccacgcgcgcctccatggggatgcgcggctgcccactgtgccgcctgctctcgcgctgcttccctcgccagcctgagctcttcgtcggtgttgtcgtcgacagaagcagagctgccagctctactgccgcgcagaacctcgagctctgttgccgccgcacgtgcagcatccgccgcctccgctgcttctacttccgctctcgccgctgccagttccgccgccgccaaccgtgctgccctcgccgctgtcgctgcagccgctgctgctgctcgctcacgttcttgtgccgcggcgacctcggcctcctgctggcgccgcgcactcgaagtggccgagcgtagggacatggtgggctagtgaggggtcactgcgtgtggaagaggctgtctcagacgaaaggctgctcgtctgagcaggggaggaaggaacagttggagctcttgctgccgactgagtgtggggagaggcgcgagaaggagatgagcacgagatgtttaggctgcaggatagtttgcctctgataccaattgtaagtagagggactctaactcccatcaagaggatgacactatgagttggggcaattttctgtttatttcttcaaacactacacaatgccatacccttagaggggttggggacacatatttatagccctaggggctgcactaccacaccttctcacacacactacacaacaggattgtcctctagatgctaaagagactacagaggacagtcaaaaagcgactgttgtcctctagatgctaaagcgactacagaggacagtcaaaaaagcgactgctgtcctctagatgctaaagagactacagaggacagtcaagctgtcctctagatgctaaaggactacagaggacagtcaaaagcaggctgtcctctagatgctcaagacttattccatcaacgtcaggtactggagagcccccgctaagctcctgtactccgatgcatccttctctgacagtagatccccgtcggtcgcggatagcttggcgtgagtgtcaacaggcgtcgatgtcggatgacactcagccatgcctgcgctgaagaagctcgaccgcgtactgtcgctgggagaggaagagaccatcggaggagcgcgtgacagcgatgccgaggaagtggtggagggcgccaagatccgtcatggcaaactcggagctcaaccgagtcataatgcgttgtaggagggccgacgacgaggcggtgaggatgatgtcgtcgacgtacaacagtaggtaggcgagacttgtcccctctcgtagaacgaaaagagacgtgtcggagatggaggcgacgaagccgaggtgccggacgaaggtggcgaagcgatggtaccaggcccgcggagcctgcttcaggccatacaaggacttctgcagatggcagacgtgatctggagcgccagggtcgacgaatcctggcggctgttggcagtagacggtctcctcgaggtggccgtgaagaaaggcgttcttcacgtccagttgatgaatgggccaggcgcgggatgcggcgatgctgagtacagaccgtatggtagtcggtttgacaaccgggctgaaggtctcgtcgtagtcaacgccctcgcgctgggagaagccacggacaacccagcgagccttgtggcgagcaagggacccatcggcatggaacttgtgccggaagatccacttccccgttacgacgttggctccggggggctgcggaacaagctgccaggtgttgttgtcgacgagggcctgatattcatccatcatcgcgacacgctagttggcgtcggccagcgcgctacggtagttcttcgaaagcggcgacggtgaggatgacgtcgtggccgccagcccctcatagcagacacgaggaatggcacccgtcatggtgcgagtgacgcgcggcggcggtggaggcgatgaagtcataggggctgttgggacagctgccggctcggacgtagacgtcgtacgggaacgacggacgtagactcgtgggaagggaaccacgccgggtccaggcgggggcacgggaccacgcccgcccagtgtcgcagaaggcgagtcgtgtgaggctgcaacgtctgggggcggctgctcaacatccgagtgggatggagcaaccacgggcgtcgaggatggagtcccacctgcaacaacagtaggacagggcaccgaaaccatatcgtcgtcgaggaggaattctagggaagcagaggacgagacatctgaggtggctgcaaaggggaaggtggtctcgtcgaatgtgacatggcgagagatgatgatgcgacgggttgataggtcgagacagcggtaacctttgtgtgagctaggatatcctaggaagatgcatgccgtggagcgaggggcgagcttatgtttagaggttgcttgcatgttggggtaacagagagacccaaaaacacgcagatggctataagttggtggttgattatgcagacgagtatagggaatttcatgctgaatagagaaggggcgcctattatggaggtagcaggctgtcaggagtccctcggcccaatatgtgggtggtagggaggcatgtagaagcatggtgcgaatggaattgttgagtgtgcggatgatacgttcagccttgccattttggggagatgtgtaggggcaggagaggcgaaggtgagtgccttgagcagcgaggaatttgatggtggcagtgtttacgaattcagtgccgttatcagcctgaaagcatttgacggggaggctgaattgtgtttgggcagaggcagcaagctcgactaagtgttggtggacatcagatttttttcggagcggaaaaacccaacagtagtgagtgtaatcatccaaaaagaccaagtaatatgaaaaaccagacagactattgatgggggaagtccatacatcacagtgaacgagttcaaagggtgcatgagttatggaatgcgaagaactaaaaggtagacgcgtatgcttgcctagttgacatgagtgacatagggagtgttgtactttattacaggaaataacatgaagtttattgagacgctctaaaacggcgggggcggggtgaccgagacgttgatgcagagagttgacgatgcaaccaggagagcatgaggtggagcgccaggtgtggagggaggcatggtgtataggtccccgtcgcagttacaacggagaatcacgcgttccgtcctgagatccttaatagagaaaccatgggtgtcaaattcaaaggaacaattgttgtcgcgagtgaattgacgaacggataacaggttgcggactatggatggggcgacaaggataatattaagagcaaaatttgttgtaggtgtaggaaggacggaatgacctctagacataacaggtatactagtgccattacctactgttattgaggagatggaggggggtccgaggacgtcatgtgcgtagaggcgccagagtcaacaacccagggcgagttgccctgaagttgcatgttttgcagggcagcgatgaggcctgctgcatcccaggtgctggtggaggtgttggagctgctggaggacgcctggagtggagcgaaggcggtgtgggcctgcggggaaaacccgagaatgcccaggggtgcgcccagcctgggcaccagaacctccctggcggcgctgtccaggaggggtgacgcgctctccaggggccacacgttcgccagtccagggattaaagccccagggaacacgtttgttggtgctggtgttgccggagttgttggagaagctaccagaggtgttgtagaagggttggtggccgccctttttggtattagggcgccggccgccctgctgctgcgaaccaccaacattagctaggagggcagcgacagcacatgtcttctcgtcgttctgcagccgcagctccttgaggagtagctgatggcgtgcggtggcgagggtgaggggctgctgtccggcgatgttgtcgacgacgccggagtagacctcgttaagtccacgcagcaggttgaggacgaggttgggctcagataccggctgtccaacgtcgcgtagttcgtcggctttctccttcatgcgaacgcagtaggcgtcaatggacaggtccccctgagtcatcgagtgaaactcgtgattcaggaagatgacgtggggagctttgtttgcctggaacacctcgtcgatggccttccaaagggcgctcgccgtctgggtgctgtcggtcatggcgaggttgaggacggcgtcggcggtggtgctgtacatccatccgcggacgcagaagtcagcctgtgcccatgccgcatcggtggggcgcgaggtggagaggtgatgcagcagcccaaatttcccacacgtggcctgaaacgtcgtcgaccacttggtgtagttggagggtttcaactccagggtcatggggacgtggagcttgatgttgatggtggcaaaggggcagaggacaggagcagaatcaacagcttcggagatggtgctcatggcgcagggaaggggaaggagagggcaggcggcacggtctggttaaggcggcgcggctggaagagagaagggggtggggcggtgcgctggaagtcggtgcagagggtttttggcggaaggcgagggggggttgggaaattagatcgatgcctgggtctctgataccatgtagagaaacagggttgagggcaattggccacacctcaatgagagggggcaccttctattatatagagctggctggcctgctttacaaggcagggataattcccctgatttatccctgatttacatctgctatatctagcaattaatccctgatttacatctgctatctatagcggctaggattccatccctgatttacatctgctatctatagcagctaggatatccacagatggcatattctattgcctaacacttatattgcatgctttgaacattgtttttctataagcactatgttcagtcataattggtgcaagctgaaaagaaatgtgccattgccattaacctttcctcccctgagcttcaagttactggtttctgaatctgtataagctgccttattttgttaccttgtaaggttatatatatttagagactaaaaaaatccagtcactggcaacagtttcaagtccttaattatttccttcaagcatataattttattttcaatgcctgtacctaacaaattaggagattgcagttggaaaaggaagctatgaacaatggtacttctccggggcaagcccatgacattgacatacctccaccacggcctaaaagaaagccaaacagtccatatcctcgaaaaagttgtctcagctccgagacacaaaccaaagaacttccaaatgacaagtcaacaaaaccaaatatgcccttgagcaatgggcatgtaaaaatggtaggcgatgcatctcttcaggtaaattctacctggtactttgctttcctaggacacatgttatcctctgtataagtatctttaactttcttttattcttaactcacttgcatccagaattttcaaaggaaggagttgtctgaaaaaggaagtcgctcggaagttcttaatctcttccgtgatgccccatctgcatcattttcttcagttaacaaaagctcttcaaatcatggggcacccaggaggaccgaggcaagtaaaacagaaagccgagatatgtccatcatggaaaataattcttttaaccccaacacccaagaggatgtaaaggtgatcagtgatcaggaaatggaaaggcttaatggtatccagatcagatctaaatgtgaacattctcatgaggggtatttggacatctcaacgcaacaaatgaagctaatgccaaagtctgtggagacaacatatgtggatgaacaaactgcaagagcttcacacaccctagcagagagcgacgggacagctagcattccagtgactgtacctgaaggaactcatcctgatcaaacaagtgatcaagtgggaatcaatggaagcatgaacccatgcatccatccaatggtttctgctgacccaaaatttggtagtagtgccacaccacagactttccctcataattatgcggcctttgctccaatgatgcagtgcaactgtaaccaagatacgtacaggtcattcaccaacatgtcatccaccttctccagcatgcttgtttccacgttgttgtcaaaccctgccatccatgcagccgccaggctcgcagcatcatactggccagcagctgaaggtaacactcctattgatccgaatcaagaaaaccctgcagatggcgtccaaggaaggaacataggctctcctccaagcatggtttctattgtagcagctacagttgctgcagcatctgcatggtgggcaacacaaggtcttctccctttcttcgctccacccgtggcttttccatttgtaccagctcctagtgctgcctttcccacagttgatgttccacgaccttcagagaaagacagagattgcccagctgaaaatgcacagattgaatgccaagaagctcgaaaacaggtacagttcgaaggtttaagaattgctgcttcttcagagtctgatgggagtggaaaaggcgaggtgtctctccatacggagttaaagctatctcctgcccagaatgctgatgccacacctaccacaggagctggcacaaatgatgcattcaggaataagaaaaagcaggatcgctcttcatgcggttctaacacaccttcaagtagtgatgtagatgcgggcaatgttcctgaggaggacaatgctaatgagaaggcgaagcaagcctcctgcagcaactcttcagctggtgacactaaccaccgcagatttagaagcaatggaagcacaagtgattcatggaaggaagtttccgaagaggttgtaatctaccaacaatatgctaattcactctgtccaaatttttgagcacgcatcattgcctttctgattcacttctttgttgacagggtcgtctggctttcgatgcgctgttcagtagggaaaagcttccgcaaagcttttctcccccacaagcagtagactcgaaggaggttgccaaggaggaggaagatgaagtgaccacagtggcagttgacctcaacaagaatgccacaagcattgatcatgatgacctcgacacaatggatgagcccagggcttcctttcccaatgaattgtcgcacctgaagctgaaatcgcgccgtacaggcttcaaaccatacaagagatgttctgtggaagcgaaggaaaaccgggtgccggctagcgacatggttggtaccaagaggattcgtcttgatagcgaagcatccacataattgatttcttcaaagttatatttacatctaagctactataggacttcagatcttgcaatgcagtgcttcattaaaactcaatctgttgtgtgctgtattttaatgcttgtcaagcagcccgctagactgctttaaaaccttatctcgtagagtctgatttaagcatcatgcaactatcaaacttttttttttggtcaaaatgtattttccttatgttttatatttttggaaaggaaaataattgaaatattatttattttgaaggctcatgcaaaggtttatttgatcaaggtgtaggataggctgagcgagagggtgaacattatgactaatatagggcagaaaatatttgaacattgtcatgtttgctgttgctagaagattgtgtagagaaagtactcacataaatgtttcacttctattttaacttgtgttatgctatca

SEQ ID NO: 9 - DNA, 235 bp, Zea mays
agcaaagcacctccgactccaagtcgcgagagccttctcattcgtcttcctcctcttccacccatcctgcctgctcacttccgttccgtagtccagctagatccccgggcaaccgatccaccgagaagcttgtggttgtggcggcggcggagagggaagcgggaggtcggaggtaggcgcggatgccactgttgtgccggcgccggcggggccggtgatgcccgcttgagctggg

SEQ ID NO: 10 - DNA, 90 bp, Zea mays
ccaccgtgcgtcggaggtggacgagggagcgaggcggcgccagaccgaggttgcgtcgggctcgatttctactgggctgctgtctgctga

SEQ ID NO: 11 - DNA, 27 bp, Zea mays
gtttacggaagtgtttggccctagaag

SEQ ID NO: 12 - DNA, 88 bp, Zea mays
agttgaagataaggagtggagctaggtttaaactctggtgacttggttgttgcgtgcaacgaatcaactatgctgagtttttctgtag

SEQ ID NO: 13 - DNA, 37 bp, Zea mays
agtaacagaaattggatcaattcaagtagatgagtgt

SEQ ID NO: 14 - DNA, 33 bp, Zea mays
tgaattcctctggcgaggaaactgtggtaaagg

SEQ ID NO: 15 - DNA, 112 bp, Zea mays
gtaagaaagccgtacacaataacgaagcagcgggagcggtggacagaggctgaacacaaacggttccttgaagccttgaaactttatggcagagcatggcagcgcatagaag

SEQ ID NO: 16 - DNA, 62 bp, Zea mays
agcatgttgggacaaagacagccgtgcagatcagaagtcacgctcaaaagttcttcactaag

SEQ ID NO: 17 - DNA, 222 bp, Zea mays
ttggaaaaggaagctatgaacaatggtacttctccggggcaagcccatgacattgacatacctccaccacggcctaaaagaaagccaaacagtccatatcctcgaaaaagttgtctcagctccgagacacaaaccaaagaacttccaaatgacaagtcaacaaaaccaaatatgcccttgagcaatgggcatgtaaaaatggtaggcgatgcatctcttcag

SEQ ID NO: 18 - DNA, 1378 bp, Zea mays
aattttcaaaggaaggagttgtctgaaaaaggaagtcgctcggaagttcttaatctcttccgtgatgccccatctgcatcattttcttcagttaacaaaagctcttcaaatcatggggcacccaggaggaccgaggcaagtaaaacagaaagccgagatatgtccatcatggaaaataattcttttaaccccaacacccaagaggatgtaaaggtgatcagtgatcaggaaatggaaaggcttaatggtatccagatcagatctaaatgtgaacattctcatgaggggtatttggacatctcaacgcaacaaatgaagctaatgccaaagtctgtggagacaacatatgtggatgaacaaactgcaagagcttcacacaccctagcagagagcgacgggacagctagcattccagtgactgtacctgaaggaactcatcctgatcaaacaagtgatcaagtgggaatcaatggaagcatgaacccatgcatccatccaatggtttctgctgacccaaaatttggtagtagtgccacaccacagactttccctcataattatgcggcctttgctccaatgatgcagtgcaactgtaaccaagatacgtacaggtcattcaccaacatgtcatccaccttctccagcatgcttgtttccacgttgttgtcaaaccctgccatccatgcagccgccaggctcgcagcatcatactggccagcagctgaaggtaacactcctattgatccgaatcaagaaaaccctgcagatggcgtccaaggaaggaacataggctctcctccaagcatggtttctattgtagcagctacagttgctgcagcatctgcatggtgggcaacacaaggtcttctccctttcttcgctccacccgtggcttttccatttgtaccagctcctagtgctgcctttcccacagttgatgttccacgaccttcagagaaagacagagattgcccagctgaaaatgcacagattgaatgccaagaagctcgaaaacaggtacagttcgaaggtttaagaattgctgcttcttcagagtctgatgggagtggaaaaggcgaggtgtctctccatacggagttaaagctatctcctgcccagaatgctgatgccacacctaccacaggagctggcacaaatgatgcattcaggaataagaaaaagcaggatcgctcttcatgcggttctaacacaccttcaagtagtgatgtagatgcgggcaatgttcctgaggaggacaatgctaatgagaaggcgaagcaagcctcctgcagcaactcttcagctggtgacactaaccaccgcagatttagaagcaatggaagcacaagtgattcatggaaggaagtttccgaagagg

SEQ ID NO: 19 - DNA, 431 bp, Zea mays
gtcgtctggctttcgatgcgctgttcagtagggaaaagcttccgcaaagcttttctcccccacaagcagtagactcgaaggaggttgccaaggaggaggaagatgaagtgaccacagtggcagttgacctcaacaagaatgccacaagcattgatcatgatgacctcgacacaatggatgagcccagggcttcctttcccaatgaattgtcgcacctgaagctgaaatcgcgccgtacaggcttcaaaccatacaagagatgttctgtggaagcgaaggaaaaccgggtgccggctagcgacatggttggtaccaagaggattcgtcttgatagcgaagcatccacataattgatttcttcaaagttatatttacatctaagctactataggacttcagatcttgcaatgcagtgcttcattaaaactcaa

SEQ ID NO: 20 - DNA, 58600 bp, Zea mays
acagcgaacagcaaagcacctccgactcggagtcgcggcgagagccgagaaccttctcattcatcttcctcttctatccatcctgcctgcctgcttgcctccgtattccagctagatctccgggcagccgattgaccgagaagtttgtggttgtggcggcggcggagagggaaacggggagcgggagggcggcgcggatgccactgctgcgccggcgccggcggggccggtgatgcccgccgtggcggtcgcttgaggtgggtggaatcgggcgtcgttgtgcggtatttcgtggcgttccctgtcattaatgaggtacctgacgctcgaatgggtgcgcgggctggtgcaggccgccgtgcgtgggaggtggacgggggagcgaggcggtgcggaccgaggttgcgttgggttggattcgattgggctgcgtctgctgaggtactactgtttccctacctaaaattcacggacctctgtttctagtccacgagacatgctcccccctccctcccggattactactgttcttttggcttgcagaaaatcacttgtcaaaatgttcgatggtgcacttcgttcttcctgggctacgtgtctttttcgatgctttaatgtcgtcatgatttcttgcgtgcaatttgagaatctgaagagtggtaacggacagtagttgtaatgagctatgccgcttctcgctgtgtttcttttgtcgaggacggcggttgggatttgttcgtagctgtgtgcttggtaacttcagggggtgagtgttttcttggtgaggctagcaagatattgttaggctgtttggttccatgactaaagtccatatcacatctgatgcttgaatatcatttacgagtattaaatatagtctaattacatagagaaacactaaacgatgagatatatttattaagtctaattaattcatgattaacaaatgtttactatatcatcacatgaacgaatcatggattaattagatttaataggttcgtcttatcgtttagttctcatttgtattattagttttgtaattagactatatttaatacttctaaatagcatccaaacatctgatgtgacaggggctaaaatttagccccttgatctaaatagcccttgactatgttgggtgaattaaaaccctaactagggttaggatgttgtattaataggtagaaacatatatgggctgggcctaagcccaatagagtacacacgtcgaacacccccgcaaatgcaattctaggtattacatatgttgagattggaacgaaacttcaagaacaccgtggatgcgagccccttggtaaagatgtcgacaaactacgaagttggtacgcgaacatcgtcgacgatgacactctcgcgcgaagtggagttcgatctccacgtgcttcgtgcgctgacgctgcaaggggttggtggagagatagactgtgcttacattgtcatagtagacgattgtggcgcgtgggagggggctgtgaagctcctggagcagctgacgtgtgatatcctggcccctgggatggtgaccgccctgatgcagttaaccaaggtcaccgcgactctgcccacaatggcagccaccggcgtagaagcagcgacgacgtagatccgcggccgacgcagatttccggcgggagcagtggatccgcggccctgcccgcaacggcggcggtcagagcagatttctggcgaaagtagcgacgacgcagatgcagatccgcggcccttgtcccagacggcggacggcacagaagccgatgatgaagggcgcaacaggtggacaacaggtggacggcgcagaagcggcgacggcgcagatcggcgtgcagggcgcagcaggcggacgacgtagaaacggcgacggcacagatccggatccgcagcccttgcagcgcagaagtcgacgatgcagggcgcaacaggcggatggcgtagaagcggatgggggaaggccgcgacggcggcagaggagggaagggggaaggctgcgacggcggctgaggatgcgcgacggcaggccggagggctggctgcgatgggcggacagacggcaaggccgcgacggcggctgaggatacgcgatggcaggccggagggctagccgcgatgggcggacggcgcagcaacggcgtgacggcgcccaaaaaaatggaccagggccgggtttagacgtaaaccctaacctactctgttaccatgtcactaacctcgattaggcgagacaataaccctattgggtactgtagcatatatatatgcagatgagaatatatgggctttatgggccttaacaagactgatagtcagtctgctagtcagactggcagacagacctcagaacaatcttttgaccctgacactggttgaaccgccccaaggccggttcaaccggttttgactagagaggttcggagagaaaacccatgttgaactggttttaaccagagagctcctcagttcaagtcaagttgaactgtcccgaagaccagttcaactcttttgagtagggaggttctccgtctcccaaagctcactccagttgaactcacagagtgtccaaaagatttggttttcaaaatagcttttgaattttagaggcttgagctttaacaaacatcatttccttggcgaaaactacttagaaaaaattaaatcctgcgactcaataaatatagatattttgcatgaccgtcgcatggaatccccatcaaggcaccatatgatgtatatctgttgtccttgatacttcctttttctttctgaactaaggttaatactcctttacacctttaaacaaactgttcatacgttaggagcaaactttgttagagaccttatttgttttatcatttaatcaccaaaatcctcaattggagttgattgcacttacacatcatctgtatacagtgataatcttgtcttcacaatagcatcttccaaattatacaacaactcctcttctgccactttaaaaaggctgctgaggacatccatcaacaggacaaagagcattggagaaagggcccccccttgccttaatcctctgtgatgtctgatctggtcaattggaaacccatttattaatacttgagttgatgaggtggctagaagactagatataagatccctccatctattaccaaagccaagatgggacaacacctcaaggagaaaggcccaggaaactgaatcaaatgcttttgttatatccgatttcagaaaaggctagccacttttttcctatgtagtgacttgatagactgttggagcagcatatagttataatggatggatcttcctctgacaaaagcacgcactctggttagcttccaccaacttgttgagaagaggtgctagtctattggcaaggagatttgtggtaagtttagcaaagctgtgaatgagactgatgggtctgtaatcaccagctgtcatggcatttgttttcttggggatcaaagtaagataagctgtgttcagtagccacaatttttgtgcattaccttgatgtagggtagtgagagcagccatcaaatctgccttaaggataagccaacaagttttgtagaatctcccagtatagccatcatgcccaggtgctttatcagacggaagactggctatagtatcccagacttccttttctgtaaagggctgctctagatcagacaagtctgctccatttctgtggcattcttctaaattcagtgttagccttctctggggggcataacccatcaaattagagtagaactcatgcaacacttcctatttctgctcatgagatgtggccactctctctcccatccattaagctggtgatagacttttcttcttgtggtaacaggcctacatatgaaagaaggatgtgttggcatgtccctctttcaagtattgtactctagatatgagtcttgctatggttctctctagggaagcaaggaccatgcactgatgtttgagttttcttaataaccataactttctggggttaaaactctgctgtcctgagccatctccaatctgtgtaatatctctcttgctatgcctagctgggatttaacattgcccactgttttatgccgcaatgattgtaggtctctggttagccttttgagctttagagagatcctctccagatggccacaatcctgagttgtctggttccaggaatttgataccacctctagaaaccctagcattttgggccagaagatctcaaaatggaatctcatcttccccttatcttctttcagttttaggactaatggacaatggtcagagtcctctgaggccttactgattaaaatataatctggaaacagctcctcccagccagctgtacagaatagatgatctagcttgacaagagtgggaacctctctctggttggaccaagtatattttcttcctatcaaagggatttccttcagttccaaatcatttatccatcttctgaatcttcccagcatggccctgttgatattggtgttattcttatcttcagagctgtaaatctggttgaaatcacctgccacgatccatggtccttcacagcctaccctgatttctcttaactcttggagaaaatcttgcttaaggttatcctggtgtggcccatacacccctgtgaaccaccattgtggacctgaattctcctgtagttgtatggagactgagtactcttttactaaaggattgctggaagtaaagaccccatctctccaagccactaatatgcccctcttgctccctgtgctaggctaaatacaaaaccactgtaaccagtaccaaggatggattggacatcaaatgctgaaatgttgctcattttggtttcttgcaagcagactagagatggtttgatatccaagatcagggtcttaacattatctctcctagctctactgttcaatcctctcacattccaaatcaggaagttgcactggttcattgagaaaaagaagctcgaccaaatgaacagatcttagtttatgccaactcaggtgcttcccacccaaacagagctgctaaggaagcaatgtgttctctggagaggggtgaattgtacattacaacatatttgttggcatcatccatggagatgttgtcttgatcatcacaaaaacccaacttcctacatacattggctactgcttcagtgcctagctaaggtggaatcttggccacccttctagatctcctaggtttgaaattgcttgggagggtcttctttctgtgcttggggattgaaggagtgatcatcaaaccatcaacgaccttgattatgtgttgtctgaattcttgtagggggttgaggctgtcggactgtctacctgagttcgttcaggtaggatttctcttcttcttgagtataccttatagcatgggggctttgcttgcaatcttttcttgatgctttcccaggggtctctagtctgctgcacaaggatagcaggaagccttagaggttcctctctatttggcaattcctcagtgttcatcaaagttgtaacattctctgctgctctaacacttgggcacactgggtcctgcccaactggtgttgagtcttggtctgtttcttcagcacttgggcacactgggttctgatcaactgactatttgccgccaatcgcctccatattcggtctctcctctgaagcagtgtcattaaggaccatttcattgcattgggatggaattggaggggctagctccattaattccatgacagatgggtcccccgaaccttccttgtatgctgggacatcacaattgaatgaggcgggctcggctacttcaattggacgggtggtcttcaaggctggggcgtcgggcgaggcttcaattgaagaggtgtacgccactggtggagaaatcgaagcgggcgcctccaccgaggagtccaggagcgcgtccgcttcagctgccccaccaatcgccacgctggctatctagcaggagacgatagctgctttcgtcgtcgcttgccgtggtcctggtcgcgatcgtcgccggaattagctgccggcggtggcggggaggggctcccgcccatggacgcaccgatcgtatcacccgcatggagattggatacaccagttttcgatgactaagggaatcgtcactggcgcctatctgcgactcctacgcatgaagatccaattccgccgccacttgctccgacttgtcacaccatgctctcagcttgaacaccgatagattgatgcgttcctcagactctgggtgtacgtctcggatgaggcagtgatcatcgagaagctgctccgccgtttccaaccaccaaagtcgtgctgggattcctctcaattcgatgtcaactagcactgacagagctcccccgctgacggccatggcttgtctggaccatgtctgatgtgaagacggatggtgggaaagacgaaaggctggcctccattgtagacctggcatgctaccacttcgttggggaggaatgcgacgtatgaattcgatgcagcacggcggaggtcgagcgtctgtgcctcgaggttaaacctcacggtgagcgcgtcagacacttccatggcgcaaccaaaattcacttggctaatgacggagatgatcagggcccgtcgaagattatcctctgcttgcatgatcttcctggtgtgtctgatgatccacctaggcccgccttcctcttgaacatggctctgttctgcctgccgctgggggagttcagcgactgctgcttcatgatcatcgttgccactccgactttcgttctcctcctcccctgttcgcggcgtgtgcgcctcttctccctcccgccgcctccatctcctccaacctctaccttgtccggtatcttgtcctcaaagcccgccatcccggtaacctgggtgattggacgccacaccagggagcgtcttggttggggcgcgcctgaccgccggtgggggcactcgtaaccatgatgctctagcagccgacaacagaagcacctcactagccgatgacactcagtcgcgtggtgggttgaggagaagcaattgaaacacttccccctgaggttagatgacactatcttaggaagaggagggggtttgggagggcggaggccattatcttccacttggccttggatgggagaaggcttgggcaagagcagggtttccttgtatgacgcccttcgccgagtgtacttcggggtaacaacgatggaggaggctgggctcctgtcgtcgcactgtaagtagagggactctaactctcatcaagaggatgacactatgagttggggcaattttctgtttatttcctcaaacactacacaatgccatacccttagaggggttggggacacatatttatagccctaggggctgcactaccacaccttctcacacacactatacaacaggattgtcctctagatgctaaagagactacagaggacagtcaaaagcgactgctgtcctctagatgctaaagcgactacagaggacagtcaaaaagcgactgctgtcctctagatgctaaagagactacagaggacagtcaagctgtcctctagatgctaaaggactacagaggacagtcaaaagcaggctgtcctctagatgctcaagacttattccatcattctccccctaagtcttgggcgtcgtcttgtgagaaagttgggccatcccggacctggagcaaagctcaacaaacttgatcttcccaaggggcttggtgagcaggtctgcaagctgatccttggtgttgatgtagcgcgccttgatgctcccttctgccaagcagtctcggatgaagtggtatctcagccggatgtgcttgctccgttcatggaacacggggttcttggccaatgccagagcggaccggctgtccaccctgagttccaccgctccagtgtctctcccgaggagatcaccgagcagtcgagccagccagagagcctgagtcgaagcagtggacgccgctatgtactcggcctcgcagctggacatggccaccacctgctgcttgaccgactgccagctgatggggcacttgccaaggaagaagaggatcccgcttgtgctcttgctggtgtcgatgtcgccggcgtggtcgctatcgctgtacccgacaaggtgtgcctccccagggcacctcgagtagtagagaccgtggtcgagagtccccgcaacatagcggatgatcctcttcacagcctgctcatgctccgtcgtcggtcgctgcagaaaccgactaacgtagccgacggagtatgccaagtcaggccgtgtgtggacgaggtagcgaaggctccccacaagacgccggtactgtgtagcatccacctccttgtaacaccccgtccaatccctggaccggcggtacttactcctggcagctctctaggatcatatattgtccccacagaccaacacgagtcttttgtgcgcactttgtcctcactcatgcgcacccgagaaaacttctcggtcggtcacccatcccaaattgctccaagccaagcacgcttaacttggagattctttcgagataggcttccgaaaaagaagatgcaccttgttggtatgattacactattaattctattaagccttgggccaagacatcccatcccaggggccaggatatcacaatccaccccccttagaagaccgacgtcctcgtcggtcaaccccaatccaggaacctcccctcttggccacgtctgtatgtctagtgtcgtcatatgccatgccatgtgaccactccgggcccacatgcgccatgcgccatatacccgaaccccctagcccacacacgcccgtgaaaccgcgagggtcggctctgataccacttgtaacaccccgtccaatccctggaccggcggtacttactcctggcagctctctaggatcatatattgtccccacagaccaacacgagtcttttgtgcgcactttgtcctcactcatgcgcacccgagaaaacttctcggtcggtcacccatcccaaattgctccaagccaagcacgcttaacttggagattctttcgagataggcttccgaaaaagaagatgcaccttgttggtatgattacactattaattctattaagccttgggccaagacatcccatcccaggggccaggatatcacactcctccgtcgtgctgtcgcgactcagcttcagcctctcctccatcggagtgagagctgggttgcagtcgatgagcccagccagctcaacaatgcgcttggcgtaggcggtctggcgaagtgtgatcccggagtctccctggtgcacctcaatccccaggtagaaggagagatgccccagatcactcatttggaaggtggccttcatctcttccttgaacgctgccacctctgcatccttggcgccagtgatcaccaagtcgtcgacgtagacacccaccagcagggcattttctccattgccccgccgatagatggccgcctcgtgcgggcttggcatgaagctcatcctcttgagcgtggaatccagcttggcattccacgcccttggtgcctgtcgcaagccgtagagagccttgcgcaggcgcaacaccttgccctccttgccagggatcgcaaaacctggcggctggtgtacatagacctcctcctttaagtcgccgttaagaaacgccgacttgacatccatgtgatgaacatgccagcccttcagggctgccagcgcgaggaggagtcgcacggattccatccgtgctacaggggcgaaggcatcgtcgaagtcgatcccctcctgttgcaagaaaccgcgtgccaccaagcgagccttatgcttgacgatggcgccggcttcatccctcttcagtttgaacacccacttaagggtgatcgcgcgatgaccatgagggagatcagcgagctcccaagtgcggtttgtctcaaccgcgtccatctccgactgcatcgcggcacgccaagccgcatgtttctcggcctctgcaaaagaccgaggctcaccatcgtcgcatgcaagatgcaactctcctgccagaatgcgagatgcagggcctggcaccgacgggtcgatgagaaggccctccacccttcgataccgcaacggctcgccgtcgtagcacgcgtcgacgcgctcctcgtcgcgggacagaggggtcacgagctccactgtgtcgtgctcgacacgagctggtgtcggagaggacgttcccggagagggtaccgtcggtgctggagtacgtgttggcgaagagctcgctgtagccggagtcgtggctggagtgcgtggtggtgaagagcttgttgtagcaggagctggagagtgtggcgctggagtcggtggagacttgggggctggggtagacctgctcggagaagagttgcctactcccccagctccctcaaagtggacgtactcgatggtgaagtcgtacgttggagtcgtgccgtcgtccaccgccttgtcccacgcccaacctcgcccttcgtcgaacactacgtcgcgcgccgtgcgcacacgctgtgttcttgggtcaaggatgcggtaggccttcgagccctccgcgtagccaatgaacacccccggggtgctcctatcgtcgagcttgctgatgtggccaagctccttggtgaacgcgaggcagccgaagacccgtaggtgagagaccgccggcttgcgcccatgccaagcctcgtacggtgtcatcccgttgagagccttggtgggcgagcggttgaggatgtaaaccgctgtcaccaccgcctctccccagaagacagctggcattcctctctgcttgaggagagcccgaggcatccccacaaccgtctggttgcgccgctcgacgacgccgttctgctgcgggctgtacggcgcggagtagtggcgttgaacgccctcatccacgcagtacgacgcgaactcagccgccgtgaattcgccgccgttgtcggtgcgcagcacgcgcagcttgcggccgcactccgcctccgcagcgacctgcacacgcctgatggcgttcgcagcctctcccttgctgccaaggatcatcacccacatgtagcgggagagatcgtcgacgagcagcaagaagtagcgtcgtcctcctggtgtggctggtgtcaccgggccacacaagtccccatgcacgagctcgagcctctccttggctcggaagctcgactgctgggggaaggggagtcgtctctgctttgtcaacacgcagacatcgcagaattgctccacatggtcaaggcacggcaggcctcgtaccatcgccttggcgctgagccgcttcagggcttcgaagttaaggtgcccgaagcgctcgtgccactgccatgccccgtcgtctcgacgagcagcaaggcagcaaggttgtgccaccttcacattgaggatgtaaagccgatttgcactcctgcgtaccttggcaagaaggcgacgagagggatcccagatcctcatgactccgtgctcgacctccacgcgcgaaccgttctcatccagctgtcccaagctgatgatagagttcctcaacgcggggatgtagtagactccggtgagcagcctgtgctcaccagacgcggcggtgaagacgactgagccggcgcccttgatctctacgccggaggcgtccccaaacttgacggagcctcggacgctagagtcaagctcggtgaagaactcccgtcggccggtcatgtgatgagtggcgccggtgtcgaggcaccatccttcgatcatgtccttgttggagccgtcgccgaggaaagcgcgtgctttcgactcatcaaggtggaggagtgccgctgcggccggtgccgctggagatggctcgatgcttgcatgtgccaggagcagggcctcctcctccgcctccgcctgtgcgacgttggcctggccacgtcgtggctgccgacaatccctggcccagtggccaagcttgccgcagttgtggcagccgtcgtctcgtgccggcttcttgttgccgacggcgctgccttgggcacctccacgtgcaccaccctcaacatgtcctcgcgccccggcctgggcgcctccacgcgccttgcgcggcttgccgcgtttgcggcctcgtgtcgaggaggactcccccttcttcttgtcaccctggcaggcctcccactgctcccgagtgagatgtagcttcccgccgatagtgataggcccagagagagcctgtggttcgtcgccgtcgaccaccttgaggcgaccaatcgcctcttcgatcgtcatcgtggagaggtctagcagagactcgatcgagcgagcaatctgcctgtacttctcggggatgcaacagaagagcttctcaacagctctctcctcatcgtaggtgtcgtcgccgaactgcaccatcttctgcaacagagtgttgaggcggagagcaaagtcatcaacatcctcacctggcttgaaggccaggttctcccactccttgcgaagtgcctgcagtgtggtcttgcgggcacgatcgctgccgatgcgggtcgcagcgatggcgtcccaggcctccttggcagtccgcttctggaaaagcgaaaactgcatctcgggcgggactgcagcaatgagggcatccagcgcccgccgatcctcgtggtagtcgacgtcgtcgtaacgaactgcttcccacatgtggcgaacctggagccgtaccctcatcaccgcgacccactcgacgtagttggtcttggtgagggtaggccacccaccgccgggaccgatgtccctgacaatggcctgggccatgcggcgaccatggtaccgatccggggagggagaaccgcgccgcctgtagaggccgcgatctccgtcgactcggtcgccgccgccgggagcatcgccggcgcgtctacgcccgtctgggctgccgccgcgtgcgcccccgcctggagcgccgtcagcgtgtcggcgcctatccgggctgccgccacgcgcgcccccatggggatgcgcggctgcccactgtgccgcctgctctcgcgctgcttccctcgccagcctgagctcgtcgtcggtgttgtcgtcgacagaagcagagctgccagctctactgccgcgcagaacttcgagctctgttgccgccgcacgtgcagcatccgccgcctccgctgcttctacttccgctctcgccgctgccagttccgccgccgccaaccgtgctgccctcgccgctgtcgctgcagccgctgctgctgctcgctcgcgttcttgtgccgcggcgacctcggcctcctgctggcgccgcgcactcgaagtggccgagcgtagggacatggtgggctagtgaggggttgctgcgtgtggaagaggctgtctcagacgaaaggctgctcgtttgagcaggggaggaaggaacagttggagctcttgctgccgactgagtgtggggagaggcgcgggaaggagatgagcaagagatgtttaggctacaggatagtttggctctgataccaattgtaagtagagggactctaactctcatcaagaggatgacactatgagttggggcaattttctgtttatttcctcaaacactacacaatgccatacccttagaggggttggggacacatatttatagccctaggggctgcactaccacaccttctcacacacactatacaacaggattgtcctctagatgctaaagagactacagaggacagtcaaaagcgactgctgtcctctagatgctaaagcgactacagaggacagtcaaaaagcgactgctgtcctctagatgctaaagagactacagaggacagtcaagctgtcctctagatgctaaaggactacagaggacagtcaaaagcaggctgtcctctagatgctcaagacttattccatcacgcaccaccttagggccttggaatgaccggtagccaacggaacaagggattgttggaactggaccgccgacacatggcgtatccgttggggccgcccgcacacacggtgtgcccacctaggctgtcgggccgcgacacacgcgcccgcacgtatagcagcgggctttaggtctctcgggccaacactccccccaaaaagctagccttttagggggttgcaccctcaaccatataaaccatgctatctcaccatcaccacacaatgtgggactattcccaacaatctccccctcacacattgtgagccgagatttgtctgagaatgcactgggccaacctgactttgataccaattgttggaactggaccgccgacacatggcgtatccattggggctgtccgcacacacggtgtgcccacccaggctgtcgggccgcgacacacgcgcccgcacgtatagcagcgggctttaggtctctcgggccaacactccccccaaaaagctagccttttagggggttgcaccctcaaccatataaaccatgttatctcaccatcaccacacaatgtgggactattcccaatagggatgtcaccgacgcaagggagaagggagtggcccccgagcctggagtaggagtaggcaccaacgtggggctgtggggggttgaggcgccggggagggaggggagtttaggggttgggaagcacatactgaaggcttgtcaggttgctggttacttttttcttgtaagtaaatatccctagatacatatgtaaaaaaggaactatgaatttcatgtactttatagggctccaacacttgacttttgtgtgcctcaggtttgtgttttagggatggtgtggctgaatgggaactccatcttatgccttgcaccagaagtgtttgctaaagttaataaaaaactattgcttctcgattagttgcccaggatcttcacctcaaatcgtgggttagagacatcagctcaccatatcaactatgtcaaatgtgatatcctttgttctggtgttgtttagccgaaggttactggcatacttatttttccaagtgttactatttgcttcccttcgaagccacaaaggggattcatggcttgcatccgatcatcaggttcttgcatctgcatgaaagcttttgcaaaaatgatagctgcccaactgcctgtgtccactaagacattgtggaccacaaaaccttttatgacacatgatatcaccatgacatcatcgtgtgggtaatccttgaggtaaaggtcttcttgagaaaaaggtgattagaatatgagaccatttggatcttatgtagggcccttggatcccaacatgctgcatccttctctgcgcttccttcttctgcctcttgttgctgggcacaaagcttgatcctctgtgatagggaggataagttgttttcgaccttgtgaagaagcaccaaagctagcgttgcttgttatgttcttcgaagttgcgagttaatcggaagtgggcgccaatgttggtcacctattcagattcctatgaagaaccaaaacagggcaacacaattaaagtaacgatgccttcctttaatccactccttgtgaagaggttgactagaggaagaatgtttggatggacgataataaataaggaaacaaaggtataaagacatccgatataagtcgatatgtgtattctcttcttcttattcctttgtcacgaaaggttacaatgataccttggagaatccagacaatggtccgaagccctatacatatgaactgcaagatctactgagggtatcattgtcttttccttccaaagacgtaaggtgcacgtcacctgatctccacttcgcctccctgttgttgttccagatccgctaaagagctttggttaattgttgatgtcgaagccttcacttctggttagcaaccttcggttgaggcacgctgtgacgaaggttaatctgaaaacagatcacaaaacaacttgaaacttgttagtgtgaggaccttcggctaagacatactcctaacaaccattagacgatcaaaggctgagtaatactcatcaatagacatatcatgttgctcaatgatatgagtttgctgcataaaggtgtgtaagagtgtaccactatcctgaacaaagcgttccttcaaatgtgaccaaatagctttagcagttgtgaatttgacaaactcattatcatggatggtttgctattcactattgcaaccataaccttgccatcattaatttgccatgttttggtcgctgcagcattgctaagatcatcagcaagaaccggtggagcttcagtcaggtgaaagagtaaactacgaactctcaatacagtctgaacacaaaaggcccactcggggtagttctgaccatcaaacacgatattgacaactatagtattgattgacataacgatgaaaaagcaactgaatttataaacagagaactgagtaccaaatcaccgaaggcagatcagatccaaccagttactagatgttctgagttggagcacatgagtgtagggtaccagactgtgcacaatcctgacaaaatacaactggaatgtcccagcagcagcagccccaacgacaagacgactatggtgaaaacgttgcacccgacggctagcacagcaaatgacaaaggaggtggccacagtgccctacaaccaggccagattggttcaagtcgacgaagaactttggtccagtttgaccagatgatggtgcgggagccccaagcggacgcgagcacatgctagagatgaaggcgtgcaacgatgctccccggcggacgcatatcgagcggggaagatctgtcggtggtggtcgcgacacccaggcagacgtgctgctgagcggtgtcgccgcaagtggtgaggacgacccgcgacagatgaggcgcgacgacgccgagggtgaagcgaccgtgggaaaatgatcgcgacggccgaaaaaatgggtggggttagagggcgggattaaagctaatcctaaccctaacctgccttgttaccatgttacctttggaaatgacgaaggataataagtccataggggttgtagagatcatatctatagaccaacatgccttagcaataggatgggcctaatgggccttaacaatatgagctttagatcttaaattttgtggctgaaaaatagtgcgttactagccctgtatagacattctaaaaaatgtagtcatgtggtaactgtttgatgtatatagatgggtctctatgttttctgtatttccccattgtataaggggtttagtgcatatttacaagtgctattcataacatggtaccagagacagaaattagggttagattttttctctaaacctaatcttttctttcctacgcacttgcctgctcgctgtggttctgttcacatttcggattcttcttggcgactctccaatcgcgtggcttcatacaggccatcgcgttcgtcgcctcgtcatccaccacaccgcacactcatctattgcatgttgtagaacaatagtcatagaagctgaaggagagtaacgatcagtaggatgccgaagacgattactacttctaagagacggctctggtgtagaagcaggagaagaaattgacccaataggagaggacaaatcaataggagcaaatgacatgattattacaggggaataggggatgattctcaatttattacctttttgtgaaggcacgtcttagtgaatagtttcttatgtccgatcttggtcctcttttgtattttcttgggattgaggtttcctctacttcggagggcttctatctctctcagaagaaatacattcaagggcttcttaatcgacttctcttactaatcaccgcactatcgagactcccatggagctcaacgtttgtcctcgtgccactgatggtaagcctctttcggatcctactcgctatcgtcacattgtaggtagcctagtctatcttggtgttactcgccctgatttttttgtatctttgtgcatattctgagttagtttgtttttgcccccacttagcttcattacaataatcttattcatgttctatgttatcttcgtgggattatttctcggcgtctattcttttcttgctctagctccttgcagcttcatgtctactgtgatgcgacttgggctagtgattcctcagatcatcagtctctttctgtctattgtgttttttggtggttccctcattgcttggaagactaagaagcagttagcagtttcctgtttgagtacaaaggctgagttgcatgctatggctcttgaggtggcagatgtgacttgactatggtggttgcttgttgatttttgtgtctataccgattctctttttgtctgacagtactggtgctattagcattgctcgtggttcagtaaagcatgagcttactgagcatattggtgttgatgcttaatatacacgagcataggtttaggatgatatcattgatctttgcctttagagcttcagttggctgatttcttcatcaagacacaaactggatcaacattgattctatctcttcaaactcaatgtggtagaaaaagcaaaagcgcgatgtcctttctgctcccgccccttccgctcccgtcccttccactcccgtcccctgaccttccacctccggccgacgcctcagcccctccaacccacagcctcacgccggtcatcctcccaaggccgacgcccacccaacctgctaccccggcgtcggcctcctctcctctctccgcccagtctgtggtggctcttcctggtggccgttcaaaggcacagcgatggtgtgaataggatcttccttcggctgcttcccggagtgatttacgtcgctcgtataaggaggcgctggtggatggaaggtccactgcctgcggcgctgatgttggtgacggtggatgggtgaaggttgtgggacgtcggtctcgccgtcgaagtccctgccccctcttcccttgcaccccccagacccgttcctgctgatttacgtgggaagtgcttcaactgtttctcgccgtcccactgtgcggctaactgtggcagtttggtgcggtgtttccattgccgcctgcctgggcattgggtgcgcgcgtgcccacgccggaagaagactctgcatcacccagcgaaggtgttggacagttcccaggaaggtcgtcctggagaaagttcctctcggcgatatggaaggtgtttcgcgggtcagcggtgatggtgatggcatgaagaagatgaagcgcactcgccgtggacagaggcgccgaaggatggaccgggaggacttgggcgcacctggtcgggtctcatcgttggcttcaccttccttgccttcggtggtgcacccccctcgttcgcatattcttaagcgttcaagattgatcgaccaggcggaggaggattttcatcgtgctatgttcgtcaatgttcttggccaagagggttctgactgcgccgctgtgatttcggaggcgctcgcctcgaagtatggtcttgaggctgatgcgctccaaatccgacgtgctgcgtccaactcgttcctggctttcttcccctccgtggatcacgttgttcgcgccttggctggtggaaattccatttccataccccccctccggctgcatcttaggaggtggtcacgtcaggcgtcagcctctggtggaggtgccatccctgtggttatggatgttgaacttggcgggatttcggcacacctctgggggattgatacgcagagcatctgctcggtggacactgcattgttcagggattacatccggatactgttgatgggacggatatgtcaattctgaaactgaaggcttggggtttctctatggattgcttgccttctcgctgtgatctccatgttgaagagccgacgtctattggagaagatggatcctgcttccctcgcacattgatctactcagtttcggtgaaggtgactactccggttgcattgccggttgaggaacaacctctgttttcctccccagatgatgatgaagatcgggatagcaagcatcagcgtcagaggcagcatctgccgaatcatcagttctcttcggtccggaactccgttcatgcacggttaggaccacgtatcactccttgtgggggaggtggaacagttgatgccgctcctctcccgaattcctcggttgatgagttgcaggcgcctgttcccttcttccttggcaatcctccatctcctgcgttaggggcgccaattattgccaatattggaccccttcctgcttcagttggggattctgtagtttccaccggtgggaagactgctgatatgactttggagccatcttccgggaatgctctagttcctttggattcaacatttaatttggaggagcaatctgcgtcaagatttctggtttcttcatgggactacaagatcagggccaaacctccctgcttcaaggtttatgttcgtaaaaaaatcccggttcagctagcacagtctgaggagattggaacttctactcctttgcagaaatttaaagatggaattacaaaacagatcaatggaatcctaccggcccctatccaaccggtcaaacgaaagagaaagctgattcctagcaatttcaacctaaggcgaagcaggagggtggccaagataccacttgaattaggctctccctctgctgcaaaggtgtgcaagcatctgggtttctgtgacgagagagagaatatttccttcacggatgcaagaagatatgctaaactgtttgattcacctctttctcgagagcatattactgcgctggcagccctgttcggttgggaggtgcccccacctgggcagtcctgagctgtgcgttttggtggagctggctgaatttgttttttcatggattcaaatggtattttgatatggaatgtgaggggtctcaacgatcgtgctaagagagaccctattaaatctttggttcttgacacaatgccttctattgtgtgcctgcgagagaccaagctgtcatccatctctgattttgatattattacaattcttgggtcggcatatagtaattttatttttagccccgccattggaaccagggggtattcttgtagcatggcgcgacagaaccctttccactggaatttctgtcatcaaggagttctcagtgtcagttcagtttcagttgctgtcaggtcaactctggtggttcacaggtgtgtatgggcctcatcaagataacctcaaactaaccttccttcaggagctcggtgtggtcaggaatgaatgtgaagggccatggatcattgatggggattttaacatgatttatagagcagaagataagaataattccaatatcaatcgacctttgatgggagatttcagaaactggatcaactctctggagttaaaagaaataccgctatgtgggaggagattcacctggtcaaatcagagagaagaccctacccttgtcaagctggatcatgtcttctgcactaacaactgggaagaatttttttcggattgtatgctctttagtaatgccactgaggtctctgatcactgtcccttgactctcaaactcaagatggatcttagggggaagcgcagatttcattttggaagtttttggcctaagctccctgggttccttgaggaggttgctgcctcctggaatcagccagctcattgttactgtcctcttgagaaagtgtccatgaagctgaagagattgtccaaaagactgcagtcttgggggcacaaaatggtgggtaatgttgggactcaattgggcttggctcgcgaggtgttgcacatactggagattgcccaggatattaggaccctggctgtagaagaggtttggttgctgcgaaaactgaaacaacattgtcttgtcctaacttctttacaaaggacaatcgcccgattaaggcctcagatacaatatttgaaggaaggggatgcaaatacaagatttttccatatgcaggcttgctttagaaaaaagagaaactttatttctcatttggaggatgagggcatgactgtgactaaccatgactagatgcaggagctgttggatacttggatagtttcttttcagatcttttggggactgaaatccagagacctttcactcttaatttgctaaattgccacagggatccagttgacctaagtgatttagaatctcctttctccgaaagggaggttcaggatacgattgcaagccttcccaatgataaagcacctggccctgatggtttcacagggaggttttacaaatctgcttggcacatcattaagacagatattatggctgcgctggactatcttcgttttggaaatgctcacagtttggggctgctgaattcagcatatcttgtgcttatccccaaaaaaacggatgccttgtcagccagggattttcggcctattagcctaattcacagcttcgctaaattggttactaagttgctagctaataggctcggcccccaccttcagaagttggtggctgctaaccaaagtgcttttgtgaaaggaagattgattcatgataattacatgatggtgcaacactctattaaatctcttcacaaaaaaagagtctcaagtttatttttaaaattggacatctccaaggcttttgactccgtttcctgggcttttctcattgaggtgctttctcaccttggatttggaaatatttggcgaaatttgatttcgaatttgttggcttcatcttccactcaagtgctgctaaatgggtctcctggtcttcctattaggcatcggagagggcttcgccaaggtgatcccctttcccccatgctatttgtgctaatcatggatgtccttagcagtatgtttctgctagccgaagatagggggttgctccataaccttcaggaagggaatgtccgaaacagaatttctatttatgctgacgatgtggttctgtttgttaaacctatagtggaaggtctgaactgtgttaaggtaatattggactgctttggttcagcgtctggattagtgtgtaatatgaacaagagctgcgccatcccaattaaatgtagcgaccaagctgtgcagcagggttgcaaccttcttctttgcagctcggcgtccttcccttgtaattatttgggtctcccaatatcagatagaaagctcagaaaggcagatcttatggactgggttgagaagatagcagatagactccccaattggaaggctcggctacttaatctcactggcagtacgacgttggtgcgttttgttctctctgccatccctatttatcttctcattgccatgagtattcccaagtgggtgatcaaatcgattgataagatttgcagagggttcttatggagaggcagaaaggacgtgaatggaggtaactgtttagtctcttgggatgtcgttacaagtgttagactaccgtctagggtttggggtgttccccctgtaattaccgtcataccctctctgtaatgggcctggcccatataccaagtctattaatactactcccaaccctgtttagggttatgggttcagtttccaatatggtatcaaattaggtttaggtcttctccacacacagctacagccgccaggggttttcttccccctgcagccgccgccggcccccagccgccggcctcccctctccggccctctctccctccctgctcgccgagccgcctgctgcctcggcaacccgacgccacgccaggacgccgccgcgccctccaccctctggccggacgcagccgcgaccgcgccaggtcgtcgccgcggcgcccgctgccagggcgccgccgcgccgccctctggccggacgcagccgcggacgcgccaggtcgtcgccgcgccgccacctgccaggacgccgccgcgccctccctccctgttcgccgcgccaccagctgcccgacgcccttcgcccaggacgccgcgccttcagcaggtccgcgcccgactgcagaacccctctgcctctctgtcctgtcgccctgctgcgtcaacgcccgatggacgcacctgccaccaccacggccggattcaacgtcggggacatcaccggccctggcacacacccccccatcgcccctgctgcactcagcagcgagctcacccatgggggggggccctacatcgccgaccttgggccgatccacgccgcctccccgctgcccctgcgtcgcagctccccgccgggctttcccgccttcgcttcacccacctggagtcaccgagtcgcgccctccgcactccccaccatcgactccccgctcgtcagcaccctcgctacgatccaggccgccgtgacggcctcgcgggaacgcgagcgcgctgcctccctcgccctggagcgtgagcgtgccctgggcgccacactgaccacccagatggccaccacgcagcgcctcctcggccgcccgacactcgccgatgcggagcccccagaggacccccacgcctctgacctcgacgccgacctcatcgctgctctccacgctcaagccgccggcctgcacaacatccgggccctcgtgtccgtggtgttggatccggcgtcttcccactacccccgttggcgaggacaggtcctcacgctgcggcggttcgtccttgacgatcacgtcctcgtcgaccacgacactccgtcgcctcgctcctggtgcctcatggacagcgttgtcctctcgtggctccacgacaccatcaccgttgagctacaggacatcatccgcgaccaggcggacactgcgcgccaggcgtggctcgctctcgaggaccagttcctcgggaatcgggatgctcgggcactccacctcgacgcccagttccacctgttctctcagggggacctttccatgggagaatgctgccgccagatgaagggccttgctgactctctccgcgatctcggcgagccagttgccgatcgtaccttggtgctgaacctcctgcgtggcctcagcccccgctacggccacctgaaggctctcatcaagaggagcgtgcctttccccaccttccacgccgcgaggaacgagcttctcctcgaggagctcaccatggcacatgaggcgcccactcttgcctcggctctctacaacgctcctaccagcggtcagccgccttcagggggccaggccaaccgtcctccgtcgatcggggctcctacacgccctccaccctccgtcccggtggcccctcgtccgacttccacacccgacggaggtcgtcgctcccgcaagggcggccgtgggggtggcggatcctctcgtggtggtccctccggccggggtggcggccatgcgtggccgttcttctacaacccctggaccgggaccatcgccatgtggccgggccaggcaccgagtgcctcccgtccctcggcgccggccctcctgactgcacctcactacggcatgcccccgacgcctccttacggtgtgtccgtcgtgccccaggcttcgcccgcgctcctgcccccggggacccacacctcgacgccttggtccccgcccggctggcggatgggacaacgcctccctcgctgctgccttcagcaccatggcgatgaccccaccccctccgactgggtgatcgactccggtgcctcgtaccacaccactcccacgacaggcacgctctctcgctcgcatctccccctcccctctcacccatcctcgatcatcgttggaaacggatccactctgccagtcacctcagtaggtgcctcggttctccctgggccgttttacctcaacgatgttctcgtagctccccacatcactcacaatcttctttctgttcgtcgattcaccactgacaactcatgttctattgagtttgacccctctggtttttctgtgaaggatctagccaccaggacccttctcgcccgctgtgacagctcggggccgctctacacgctccagcccaccaccgtcggcatgtcaccacctcctgtcctggtctccaccacctccaccacatggcatcgtcgtctcggccatcctggatccgacgtcatgaccaagattaccagtagtctagatccttcatgtagtaggggacattttgagggtctctgtcatgcttgtcagttaggccgacatactcgtctcccattcactacttctcgggctgagcaggcttttgacctggttcactgtgatctttggaactcccctgtactcagtctttctggttataaatactatttggtaattttggatgatttttcccattttctctggaccttcccgcttcggttgaagtcggacacattcaccaccctcacacacttcttcacctgggtatccactcagtttcgtcgcccggtacgtgctctgcagtgtgacaatggccgcgagttcgataacaacgcctctcgctctttcttcctcactcacggcgtccagttgcgtctcccgtgcccctacacctctgcacagaacgaccgagccgaacgcatgatccgcaccaccaccaatatgctccgctgcctcctcttccaggcgtctctccttgccagctactgggcagaggccctacaaactgccacccacctcctcaaccgtcttccctcgaaggcgatgcgccaccctacccctcacttctccctatacggcacaaccccttcctatgaccaccttcgcgtgttcggctgtgcctgctaccctaacacctctgctactgctccacataagctttctcctcgctccacccgctgtctattccttggctactcccctgaccacaaggggtaccggtgtctggacctcacctcccaccgcatcatcatctctcgccatgtcatcttcgacgaagatgtgtttccccttgctggctccaccccacccaccgatcttgactccctcctcgagtccgatccgattcctcccccacctctggctccccgtctcgcgccgttccctgctcctcgtgcgaccactatgacctcttccgcgccatgcgcggccctgtcgaccacgcctgcgccacgcgcggcctcgtcgaccccgcctgcgccacgcgcgaccccgtcgaccccgcctgcgccacgcgtggcccggtcgatcctgcctgcgccacgcgcggccccgtcgaccccgcctgcgccacgcgcggccccgtcgaccccacctgcgccacacgcggccccgtctcgcttcgccaaccccgcactcgtctaccatcgccgcggccacgccactacctctgcgccccccgactcgggtccgtcgacgagcgcggcccggttcgccgaccccgccgtcgtctatcaccgccgcgagccggcccctccagccgctatcgtcgttccggcggtttgctccgagtcgtccgtctaccacccggtcgccatccaccgcgaccccgggcacgtccacccgatggtgactcggcgcgctgctggctttctccgccccgtcgaccgcctaatcttggcagctgctacgtctggcactccacccgacgcttccccggtgccctcctccgttcgcactgccctcgccgacccacattggcgtcgtgctatggaggagtacgcggccctcttggccaaccacacctgggacctggtgccgcggccaccaggcaccaacgtggtcaccggcaagtggctatttcgccacaagctgacctcggacggctccctcgaccgctacaaggcccgttgggtccttcggggcttcacccagcgccccgaggtggactaagacgagaccttcagccctgtcgtcaagttcgccactgttcgcgccgtcctctccctcgccctctcccgcgactgggcgatccatcagctcgatgtcaagaatgccttcctccatggcactctaacggagactgtttactgcagccagcccaccggcttcgtcgacgccgaccgcccggatctggtttgccggctgaatcggtccctgtacggcctcaagcaggcgccacaggcttggtacagtcgcttcgcctcctacctggcctccctcggcttcgtcgaggccaagtcggacacgtccctattcatctaccggcgcggcgacgacaccgtctacctcctgctctacgtcgacgacattgtgctcgcggcatccaccgccgaccttctacaccgcacgatcgtcgcccttcaacgggagttcgcgatgaaggacctggggcccctacaccacttcctcggcatcaccgccgaacatcggcctcagggtctcttcctccaccagcgccagtacgccatcgacatcctggagcgggctggcatgtctgactgcaagccctgctccacgcctgtcgacactcaggcgaagctctctgaggacgacgggcccccggtcgccgacacgacgtcataccggagcctcaccggcgcgctccagtacctcacgttctccaggcccgacatcgcctacgccgtccagcaggtgtgcctgcatatgcacactccgcgggagccccatctcactgcaagcggattctgcgctacctccgcggctccctcgactacggactcctactccgcccatccccgacgtcggagctcgtggtctacaccgacgctgactgggctggctgtcccgacacgcgccggtccacctccggctatgccgtgttcttgggcgccaacctcgtctcttgggccgccaagaggcagccgtcgtctctcgctccagcgctgaggccgagtaccgtgccatggccaacggtgtggcagaggcctcctggctgcgccagctcctccacgagctccacagtccccttcagcgcgccactctcgtctactgcgacaacgtcagtgcggtctacctctccaccaaccccgtgcagcatcagcgcacgaaacacgtcgagatcgacctgcacttcgtccgcgagcgtgtcgctgccggtgacgttcgggttctcagcgtccccaccacgctgcagttcgctgacatcttcaccaagggactaccgtcgagtgtatttttagacttccgatccagtctcaacatctgtacaggatagagttttgactgcgggggggtgttagactaccgtctagggtttggggtgttcccccctgtaattaccgtcataccctctctgtaatgggcctggcccatataccaagtctattaatactactcccaaccctgtttagggttatgggttcagtttccaataacaaggccgcttttatttggtgggcttggggtcccaaatttgtattatcagagctgggcactgcaggctaaatggttgtggctggagaaaacagattcaaacaagccctgacatgggcttaagttgcctgtgccgttgcaggtcaggaagttctttcatgcttcggttattactgcggtgggcaacggaaacagaactttattttagactgatagatggataaatggcgactgcatcaatgattttgcccctgatgtcgtttccaaggttgataaacttattgtctccactagaacagtggcccaggctcttggaggacagcaatggatcagtgacatcttgacacttctttcctggacggggatccgacaatttttgctgatttgggatgatgtaagcaatattgtgttaacacaggaggcggatattcacacctggctgcatacttcctctggttagttttcttctaggtcttgttacagggctttttttatgggagctattactttttgttggaatgtgtgcccataccctaaacaggggttgggagtggtattaaatagaatgagtaactgggccaaggcccattacacaggggtacaatggacattacaaggggaataacacaaaccctagacgggtagtctaacacccccccgcagtcacaactctatcctgtacagatgttgagactggatcggaagtctaaaaagacactcgacggtaaccccttggtgaagatgtcggcgaactgtagcgtggtggggacgctgagaacgcggacgtcaccggcagcgacacgctcgcggacgaagtgcaggtcgatctccacatgcttcgtgcgctgatgctgcacggggttggtggagaggtagaccgcgctgacgttgtcgcagtagacgagggtggcgcgctggaggggactgtggagctcgtggaggagctggcgcagccaggaggcctcggccacgccgttggccacggcacggtactcgacctcagcgctggagcgagagacgacgggctgcctcttggcggcccaagagacgaggttggcgcccaggaagacggcgtagccggaggtggaccggcgcgtgtcgggacagccagcccagtcagcgtcggtgtagaccacgagctccgacgtcggggatgggcggagtaggaggccgtagtcgagggagccgcggaggtagcgtagaatccgcttgagcgcagtgagatggggctcccgcggagtgtgcatatgcaggcacacctgctggacggcgtaagcgatgtcgggcctggagaacgtgaggtactggagcgcgccggtgaggctccggtaggacgtcgcgtcggcaaccggaggcccgtcgtcctcagagagcttcgcctgagtgtcgacaggcgtggagcagggcttgcagtcagacatgccagcccgctccaggatgtcgatggcgtactggcgctggtggaagaagagaccctggggccgacgttcggcggtgatgccgaggaagtggtggaggggccccaggtccttcatcgcgaactcccgctgaagggcgacgatcgtgcggtgaaggaggtcggcggtggatgccgtgagcacgatgtcgtcgacgtagagcaggaggtagacggtgtcgtcgccgcgccggtagatgaacagggacgtgtccgacttggcctcgacgaagccgacggaggccaggtaggaggcgaagcgactgtaccaagcccgtggcgcctgcttgaggccgtacagggactggttcagccggcaaaccaggtccggatggtcagtgtcgacgaagccggtgggctggctgcagtagacagtctccgtcagagtgccatggaggaaggcattcttgacatcgagctgatggatcgcccagtcgcgggagagggcgagggagaggacggcgcgaacagtggcgaacttgacgacagggctgaaggtctcgtcgtagtccactccggggcgctgggtgaagccccgaaggacccaacgggccttgtagcggtcgagggagccgtccgaggtcagcttgtggcgaaatagccacttgccggtgaccacgttggtgcctggaggacgcggcaccaggtcccaggtgtggttggccaagatggccgcgtactcctcctccatagcgcgacgccaatgtgggtcggcgagggcagtgcgaacagaggagggtaccggggaagcgtcgggtggagtgctggtcgtagcggctgccaggatgagccggtcaactgggcggagaacgccagcggcgcgccgagtcaccatcacccccgctgcaaccggcgtggaaggtggggaagggcacgctcctcttgatgagagccttcaggtggccgtagcgggggctgaggccacgcaggaggttcagcaccagggtgcgatcggcaacgggctcgccgaggtcgcggagagagtcagccagggccttcatctggcggcagtattcgcccacggagaggtccccctgagagaacaggtgaaactgggcgtcgaggtggagggcccgagcatcacgattcccgaggaactggtcctcgagggcgagccacgcctggcgcgcagtgtccgcctggtcacggatgatgtcctgtagctcgacggtgatggtgccgtggagccacgagaggacaacactgtccatgaggcaccaggagcgaggtgacggagtgtcgtggtcgatgaggacgtggtcgtcgaggacgaaccgccgtagtgtgagaaggacctgtcctcgccaacgggagtagtgggaagacgccggatccaacaccacggacacgagggctcggatgttgtgcaggccggctgcttgagcgtggagagcagcgatgaggtcggcgtcgaggtcagaggcgtgggggtcctctgggggctccgcatcggcgagagtcgggtggccgaggagacgctgcgtggtggccatctgggtggtcagagcagcgcccagggcacgctcacgctccagggcgagggaggcagcgcgctcgcgctcccgcgaggccgtcacagcggcctggatcgaggcgagggtgctgacgagcggggggtcggtggtggggatggtggagggtgcgacacgatgactccaggtgggtgaagcgaaggcggggaagcccggcggggaggtgcgatgcaggggcagcggggatgaagcgcggagcggtccgaggccggtgatgtacggggcccctccatgggcgggctcgctgccggttgcagcgggggtgatggtgccggtggcggcagtggtgttggcgtccatggcggcggggtcgcaggggcaggggcgcggcctggccaggcgcctggtcgaggaggcgcagggacgacgggcgccgctcccagggggaaggccggcggcggcggacgtgcaggggcagaggccctgggcgcgacgggcgcgcaggggaggaagaccggcggccgagggaggccggcggcggcgtccggggtcggcggatgcgcaggggaagaggggccctgggcgcgacgagcacgcaggggaggggagacggtgggcgcgtcggggaagagggacggcggcggacgcgcaggggcagagaggcgctccgcgcctgggcaggggaccggcggtccggcgccggcggctgggagggagagggaggccggcggctgtggagccggcggctgggagggagagggagccggcggctgggttgccggcggcgggagaagctggaaaactaaccctagcgctttgataccatgttggaatgtgtgcccataccctaaacaggggttgggagtggtattaaatagaatgagtaactgggccaaggcccattacacaggggtacaatggacattacaaagggaataacacaaaccctagacgggtagtctaacacttttgaaccttggaagaggctttggaaatcttgggctcccccaaagtgcatgtatttcttgtggctggctattcggaataaatgttggacttcagatagattggagaagagaggtctggaccatccagtgtcttgcctactctgcgatcaagcgcaggaaaccatacaacatattttgtgtacctgtgtctttgcaagacagttctggcattccatcctgttcgtgttggatgtaggtaatctctctccatcaggagatgtgacctcctttgctgattggtggcgaaaaacaagtaagaagattcataaaagcaagagaaagggcatgaacaacatcatcattttgggggcctggtgtttatggatccaccgcaacaaagctgattttaatggggagaccccttcgctaagctctatcagatgcgtctttcttgatgagattgggtgttggattacagctggagccaagcatcttcagatttttggcttagagcttgcgcgtaaccttcacagggtctagggagtggtgtgagtttttttgttttgattaagcctgcttagggctttgtaccttggtccattttggaccttttttcttctctaattaaaatgatgcgcagttctcctgcgctttcgaaaaaaaactcattgtggttgacccaccttgagtttgaggggttgttagatgtatatagatgggtctctatgctttctgtatttccccattgtataagtggcttagtgcatatttacaagtgctattcataacagtaatttacatttcaaaggaagcacatgaatatttaaatgatgttgctctatcttaacgcttttatgcagagtaaggacaattggatcaatttaagtaggtgagtggaattgatccttttgaagtttctgaccccagttcaattctacaggttttctcgtgtaaatttgacactactttggctgctcttttaggtctgggcacacaaatttgaactattaacgcattgggagtgcttgtgtgttagaggtctaggaggagctatgaggtactacttccgtcaggtccagcgtttggttggagatatggaaggaggagctctcttgtttatagatgacctcaactccaagtgacaaagtgaacagctgttgaacttcccgtctatttctgtttctttttgctggatttggagatggaggtgaattcctctggtgaggaaacggtgataaaggtgagttgttctacaatgtgcttctttgatttatggtaaaaaaggaacattttatcactgttctttgttggaaacaaaatcactttgtttctcttatatattaacacaggtagtttcacttcacacagcttgactgaccttcataaccaaagctacataaacactagctttctatacattatacactagcttgatcttcacaaccaagccctatcttctctatctggctcacatagcttcaacttttgttgggctgcaataatctgctgcttgctggtgcctttacctcttatttatagctgaaaatagagtaagaaaacatccctagtggcttccctagaaattacctagtgactttcctacaaactaagaggaagattagagtgtgatgactgacttcactgtacagattttgactcattaactagacccactaacaaaagaccatcagcagctaggatatgctacactggtttcatgtcttcatccatacatgacaaaattactcctacattctttgtaggtaaggaagccatacacaataaccaagcagcgggagcggtggacagaggctgagcacaaacggttccttgaagccttgaaactttatggcagagcatggcagcgcatagaaggtaaaatatccatagcggctgtatccaagtagttttatgctattatttcctgacttcatcacttgtaaccagtgttattaaaactacgtttaaacgatgtttaaactacgtttaaacgtcaaaactctaattagaggttgaaatcacgttttagcgttttggcgttctaaactgtaaaacgcagtgttttatgcattttagaccattagctatttttgggcccggtctattagttactttaggggtttaatccagctcatgggtgaagttttggtaagccactaacctctctgttttggtatttaacttcatattattgtctgaaattatgatatattggtatttttcctatgttgtttaaaactacgtttaaacaaagtttaaacgtttaaaagtcaaaatttcacccatgagcgttccaacgttttatcgttttaataagcttgcttgtaaccactgaggattattcatgtggatttagttttccaattgatactgattgcaatttttttgtttcatcaatctccatagagcatgttgggacaaagacggccgtgcagatcagaagtcacgctcaaaagttcttcaccaaggttctttctctatctgattggctagtgctcttgtttggttcagtctagttgcattgtctttatatttgctgataatgctaattacttttgtagtaatttccagtttttagtgtctttacattaatgcattattttttctacttacatatgtgtgccacagtgatgggtttgaaaagtatgagccatgtatgatttatttgttttgacctcagtgctctatttattaactgatcaaataaatccatattgaaattgaaaaaaacatgaaatttgcttatacctggtccatttatttacgtatccatgttgtcactgagcttataatcatctatattgtgtaatatgaccgaagtaccaataatgggatggaaactgtaggaaattgtagtacttggtctattgataggagatgtggtacaacatatagactcacaggaccctaaccctaatgggccaacagcccaacagtggtgctggcccactcacacacacagtctaacaccccccgcagtcgcaacgggggcaccacacatgatgagactggagtagaaggcgaaggtaggagccgacgggttgaaaccccccacagtcgcagcgtcgtgagggtgcggatgttgcgactggagtagagaccgatgtgtgctccaagaagacgatagcccctagatgtcgaggtagccgaagccgaggtggtcgcggtcgggagacacacagcagaagcctgttcttcgggaggggtcgacgttcgagcgtcaacgatcggcgagggcgacacaacaaaagagcaccagtaggtcgaccttcttacttcttcgatcgtctggacgtcgaggagccccgccaggaaggccgacgacagcgcacgcatctgcgctggtcatggtggccgtgcctgcgacaaaatagaaggggtaacggcggatccgatagggaagaccacgacaatgacggatccagtcgggaagacgcgatccggtcaaagggacggcagatcgagccaggaaggtcacaacaacggtgaataaggccaggaaggccgtcgcagcgacggatcccatgaaggcgatgaaggggagggcgacggggtggttccagccgggcaggggcctgcatcggtcctggcaggaagggttgacgctggcgacgggagaggcgcgaagagagaggcgctgctaggcggctcaggcgagggcagggggcgcgttgatggcgtcgctgatcctagaactggccagccaagggggagaggaaagagagccgcgaccaggaaggtggcgacgcgagcctaagcgaggtagaggcgctcgacggcggcgcgacctggggtcgtgcggcgcttttgcggccgaggggaagggaggggggcctcgggcgatggcctccatggccggcgaggagaggagctcggtggaggccagcgaggaggctgacggaggacgtagtcgagctcggccgctgctccactggaggggcgcgcaggcaggcgagctcggccaccaccaccgctgctccacgggagggagcacagacaggcgagtctcgccgccgctgccgctccactggagggaggaggctcaaggcgcaatgggctaggagaggagagaggggaggctagctgccggcgggtgggaggccgcccccgggagggaaggttgagcctcccgggggcagtgcttctgctggaggcggctatgggttgggagcagccgacgactgctgggggttgggaggaaacccctaaacctaaccctaacctagtctgataccatgtaggaaattgtagtacttggtctattgataggagatggggtacaatatatagactaacaggaccctaaccctaatgggccggcaacccaacagtggtgccggcccactcccacacacaaagtctaacaaaaacctattagactgaaattgagactatacattcaacagcagtagcagcagcaacaacaacaaaaccttttaatcacaagcaagttggggtaagctagagttgaaacccaacaaaaaccacaaatcaaggtgagactagattgtatatgacaaatatttaggctgcaataagttgcttgaaagctagatttgatgaagacaaaaaccaacttaataataaacacataacatgatatgagcaacaaagaactattcaagtttcttttcatgccctaaactggaaactgccccttctctgttgtttttttccctgctgcgtgacctgtctgtcctgagccttttaggggctaggctgtgacggggttaatttgagagctcaccacttatacagttgtctgttcatgatttaccaccctggatcacttttattgcacagatgatcccaaatgtcagtgggatgggccgatggggtgccaaatcctgaaccagccaatcttaagagtcttcatggaacaaaaagtgttggctcaatgaggttgcattgtccctctctgtggcatatttgccaattccatggaagggaaaggatggcaaggttaatattttgagaaatacgatctctaggttttcaaagctcatatataggacgcaaagtgtaaaatgcataaacaccaagacaggagtgttgttctgaaaaagaatatttttaaaaagagtaaaatgcattagcggtccttgaacttggcatgttgtgtcaaagtccctgaactctcaaaactaggaaaacaggtcttcgaacttgaccggccattcaaaactggatttgctcaaaccggatgccgatgtggcaatgccacgttgaagtcacttgagttctggaacttgatatgttgtatcacttgagtcaccgaacttggcattatgtgtcacctgggtctccgaagtttcattagtacgcttcagcgtagcacgccacgtcgacatctggtttgagcaaacccgattttagatggccgaccaaattcgaggacccattttactggtgttggacttaagtgacacaacatgccaagttcgagaagcgctaatgcattttactcttttaaaaaggtcctctcagttctatacttatattttggttgcatggttgcaccaacatgtatggttgcaccagatatgttcccatgagtgcttaacattttacctctttataaattgacttgtagtttgagctgggaagagatggatgagtggggggaaaatccatccttcaatctccactcaagtgaagcaaatgttggaatttggagcaggcattctagctgtcactaatccactatgctaatgtattattttttctggaaagttgtgtttcgccgtatttttctaggagagcaattatttggtcaatctagaattcgtaaggccttaggccgcaacattgagagcctaaaaggttaaaacaccactttgatactgatacatcattatggtttgggggcattaactagttcatacctaggccttccttaaaccatcacatttcaggtgcaccacattatttgttctaaaccaacgctgtagtcagtaatcgcaatcatatagctgtgaaactattgtttgacttttgtgggctgaaccaccatgtgtgggcttctttttggatctggtttagtggtagccaatttaaaacaaaatttcacttttgtttgtgcaaacttgtgatagtaatggaaggagaagcaggtgaagtacaaagttgacatgagaaggggcagtaaaaggagacttgaaaggatgaaatacttaaagatttagccttgaataggagcgaatgtaaaacaactattcacgtgcttgaatcttgatttgtggctcttgctgggtttcaactctagcctaccccaactgcttgagactaattttttttgttctgtttgtgcaaactcgcaataagcaacagacacacagaggtctggtagttcatttcttttgattttcctcatttatattttcggtaatatcaatttaatccacccaaatgccataaggttcctctagctgtaatctcaaaagccctatgttgcattcctgcttggtcaatgatgatgggcatcatggttgacactccaagtttgaactgaacctcgccatggcaatctgaggccaggagataatatttctgacatataaattaacttcaacgatttcacataaaaccataaataatatttacttaattaacgatgaaggaaaactgtttgattctttttcaattaaagaatctccatgcctttttcagttaaatttgattttgattttttctgttgtctgtcaggatcatttaagagaaacaggagtgtttcttttctcgaacactaggagagttgtgtatctttatgtaagaaaaaaagtcttacaaaaagtttctaagggtacttgcttgcccttgctataaatatagcgaccttgacctagacctcacataggcagcagggctagcccagtaagaaatacccgtggtcactggtcagtgttgcctgctagggtttctgtcttgcctgtctagttaaattgccttttgcccagttgagctggctacttggttttcaggttaatttctatgggttttggtagtaaataataaataaaatttccatacgaagctatttttccttagtctgttcttatccttctctagagaagcatgtatgccactcaaccagcactatcacctctttctctagtctcatagaaggaatgccattaacttataagacaagctgaatcaatgatatctacttattagggttattaaaacgctgttacaaactgttttttgccagaattttctatatgatgttgtagaaatatgcatgctttactgaacaaggtctgtctaaccacctttgataccttgtatctggaacatttctgagaagcttatgggcaaagtctgaagattctttcttgttttttttggtagttgaccctgttagagtgggcgcactaaccagttcaatccaaaaccttaagctgatgggagaaagtagacaatccatttatacacgtcaacacccccactcacgtgcagccagatagaaaggcgcaaatgcagccaaagagaaagtcgcaaacgtggaaataaataggtggaggcacaaatagagcctctgccaggattcgaactcgagacttctggctttgataccatgttagagtgggtgcactaaccggttcaacctaaaagcttaatgtgatgggagaaggtagacaattcacttatacacttcaacatgtccattcattatcaagagtgaataagtcttatagtgttctaccaatgcagtctggctgatcaacttctgaagcagataacaagaagcagttggggtggggtccgaggacctatgcaagtttagaatcattttgtttttggtgggtgggggcagggtgtagttgatacaaactagtggggtaaaggggtttacttggctgtgacttattatatgcttgtaatatctattgtctaattgctttcacaagtgtctcttttgatttagtccaaatttgctagcagtgccaggtttgcaccaagtgctttttatctttataatgtaggctagaggttttgagtagttattattgctatattttcatggaaggttgttcataaagaaaggaaatgatgcttaaaaaccggctatgatttgcttcgccccttcatggcaaatattaaatatataaacagtaaaagatagaacttcagtacgttgtctgtattttattccattcattcacatgttcttcaccacccagtttcattctgcaagtgctgcaatgtagttctgtaggaggtgaaggtttcagacatttgtaccctacctctgtccttgtcattgagccactcgccaacatacaacctccgttctggcaggtctgcagctagccccccccccccctctctaggtatgaggaaattgttagaatacccgttagggtttggaactctccctgtgtaattaccctctcgccccctctgtaatgggcctggcctaactccaaacctattaatatatcactccaccctattctagggtttttttttcttgaacgcgcaggagagctgcgcatcattatattaagagaagaaaaaaggtccaaaatggaccaaagtacaaagcccaaaaggcagaacaaacagacccaccaaactcctgctgtgcacagtgccccaacctccagcaaaaggaggcaaacaacaaacgtgccaacaggctccccacacacacctgcactactcacccagaaaactccctggacctaataatggcagcacctaggcctaagccctcaagatgcttggcaccggctagaccccaacattctaactcttccaagaaaacttttttaattctgcttatggaaggactgacaccctcgaaaactgccttattacgatgaatccataaacaccaagcccccatgatgatgacgctgttaatgcctcttcttttggatttgtgcacttgcttacacaccttcctccaccactcagcaaaagatatctcaatagaaacaggagaaagattagcaagccccaacggtgcaagaatgcaatgccaaaattgtctagcaaagatgcaactgcaaaggagatgttggatattctccggctcctgatcacatagaggacagacctcaggatgatccagccctctcttctgaagtctatcagctgtccaacatttattccttattgccaaccataggaagaatttgcatttgggtggagcccaagatttccataacctcttccaaggttcaaaggtaatcgaacccatgaaaaaagccttatagcatgatctagaagagaactgcccagaggaagaatgaatccacacatgtctatcagcctcttgtgtgagcaccactcctcttaaagcgtcccaaagctgtaggtactgctgcaacccaatcaaattaagaggggtttctaagtcgctgacccactgccagttctcaagagcatgggccaccgttctggaagaactagcccttttcccaacacaagcaactacatcaggggcaagatcctggatacaagacccatccaaccacctatctgtccagaataaagtagtagacccgtctccaaccaaggtaataattgaagaagcaaagaatctcctgacatgctgctgaatagggaaattcagcccaacccaaggcctatttggatctgttttttccaaccataaccatttagtctgcagcgcccagctttggtaaagtaagttagaaatcccaaggccaccaagatataaaggccttgtaattatatcccaagagacaagacaacaacctccagttacctcctttcttcctttccaaagaaatcctcttcgaatcttatctatagaattaatcacccacttgggaatattcatggcaatgagaaggtataccgggatggccgaaagcacgaagcgcactatagctgtcctgccagccagattaagcagccgggccttccaattaggaagccgatcagcaattttgtcgacccaaaccatgagatcattccttctgagcttcttgtctgatatcggcaagcccaaataagtgcaagggaaagatgaagaagagcactgaagaatattgcagcccacctgcaccgcttgctgattacacttaattggaatgacatagcttttttgcaagttagacaccaacccagaggctgaaccaaagcaatccaaaattgttctgacgcagtgaagatcttcctcaacaggttgaacaaaaaggactacatcatcagcataaatggacagcctgtttcgaatattagcgccctccaatctatgcagcagccccctgttttcagccagcaagaataaactgttgagcacatccataaccaagacgaacaacataggagaaagaggatccccctggcgaagccctctccggtgtttaataggaataccaggagacccattcaaaagcacctgagtggaggacgagatcagcaaatttgaaatcatacttcgccacacaggaccaaaaccaagatgtgaaagcacttcagtcaaaaaagcccaagaaactgaatcaaaggctttggagatatccaacttcaagaacaaactagagactttcttcttgtggagagatttaattgaatgctgcaccaacatgaagttgtcatgaatcgatcttcctctcacaaaagcactttggttagcagccaccaactcctgtaggtgaggacccaacctattagcaagcattttggtgaccaacttagcaaaactatgaattaagctaattggtctaaagtcccttgctgtcaaggcatcaatttccttaggaagaagagctataaaagcagaattcagcagccccaacttgtaagcatttccttgatgaagcgaatttatagctgccaacaaatctgacttaataatatgccaacaacgcttataaaacctccctgtaaacccatcaggaccaggagccttatcagaggggagagctccaactgtgtcttgaacctccttttccgagaaaggagcctccaggagactcaaatcaatagcatctctatggcaactagccagatcaagagtaaaaggcctctggacaatagaacccagaagattggaaaagaaatcatccagaacttcctgcatctgatcatggctggtgactaaccttccctcatcctccaaatgagagataaaattcctcttcttgcggtggcgagcctgcaagtggaaaaattttgtgttggcatctccttccttcaaataatggacccgggaccttaaccgtgcaactgtcctttccaaagaagcaaggacaaggcaatgctgcttcaatttgcgcagcagccacacctcctcagacgacaacaccctgctgtcctgagccatctccatcctgtgcagcacctcacgagccacccccagctgagaactgacattgccgaccgcgttatgcccccaagattgcaatcttctcgctaatcttttaaactttatcgacaccctctcaaaagggcaagaagcctgaaccggctggtcccaagaagcagcaacctcttccataaaacccgggagtttaggccaaaagctctcgaaatgaaatctacgcttccctttaagatccaaactgagtttaaggatcagaggacaatgatcagaagtttcagatgcactgctgtaaagaaagcaatcggggaaagcctcctcccaacaggtagaacagaaaacatgatccaacttaacaagagtgggattttccctctggtttgaccaagtaaatctcctaccattcaaaggaatctccttcagatccaaagagttgatcaaatctctgaaattgcccaacaaagccctattgacatttgaattattcttgtcctctgacttgtaaatctgattgaagtcaccagcaatgatccacgggcctacacaggcattcctgatgtctctcaactcttgaagaaaggcaggctttaagctatcttgatggggcccataaaccccagtgaaccaccaaagaggaccagaaacgctcttcaactgaaccgagacagaattatccttgatcactgaggccactgatgcaaaagatccatcatgccaagcaactagtataccccctctagacccatgagcagggccataaacaaaattactgtatcctgacccaagaatagaaagaatgtcaaaatctgaaacggagcacattttggtttcctgaagacaaatgacagcaggtttgaggcttacaactagcgacttaacagagtctcttttagcacgattattgagacccctcacattccaaatcaaaaaacagccagattccatggaaaacaaaaaaggaggctaccaaaccgaccacagcaaccagctcagatctgctccacatggggcacctcccagccaaacagagccgctagggcagcaacatgatccctggacagtgttgaatgaaacagcctagcataattactagcatctcggaaagaaatattttcatgctcatcacagaaacccaaatgcctgcagactttagcagcagcgtcagatcccaactcagggggaaactttgccaccctcctgctacgccgaggcttgaaattgctaggcatcatctttcttcgcttgacaatcagagcaggagggggcaacagctcatcagtcggctttgtaagaccatctttgaattcttgcaatggggtagacagtatccgctcctcaaccacaatagccttcttccttctagaatatactttgaaacaaggtggcttggcattcaacctgcatgccaaagacatagctggccccataggcagatcaaagatagaactcaatgtctctaaactgcaatcaccctgaaaacccaactcaacatcaacagcccttgagcccgcagaagaaaactgagagccagcagcggggagcccattcaaactgtggtcttgcaagccagcagagggcagcgaggtagacaccaaactcctttcatccaaactgaccggtacatcctgggcgtgagagccaacagcacgcgatgcctcctccacctggggaggaaccgccggagaagcgtccaagcaaggtgggggtggcccaggcgccgccaactctacgaccgaggtgatcgggagagtagcggcctcaactggtgcccccaacatctgaaccgaggaaaccagcggactggaagacacaggcgccgtcaactcttcacccgaagcagacgggagaattgcggcatcaactggtccaccagccaccgaagacgaaggggcacgcgggcccagccgcgagtgcaccgaggtccgagacgaggaagccgaggggccatgctgaagcagccggccgcctctgatgatcttgatcatggtcttcgtcgacatcaccaggaggtgatggcggaggcggaggcaagctcccctccggcctaacaccggaacgggtaaccttcactgtaataggataaatcaaagagcgagggaaaatggcaccctctccctcctcaacaagaggctcttgaacatgaagatccaaaacaacaggcaaacaatccggatcaaaactccacgcccttagcttgagaacagatatatcaatgccctccactgattctgggtgcagttcctgaatcagacaaaacccattcaaaagaacttcagcagtaccaagctcccagaggtgggcaggaatccccctcagctcgatatccagcagcagaggcagggcgcttccaccagaggccaaggcctgacgagaccaacgcttgaggtgcaaccttacaggaggaatgaaaagtgactgcccaccattgaagacacgagtagcatgatcctctgtggggaagaagaccagaaaagagttcgacgcagcacgctgaagatggagcgcatcagcttcaaaagaaaaccttgaggcgagcgcgtccagaacaatagcggcgctatcagaactcatgtggccaagaactgtgacgatcagcgcccgacgaaggtcagcctcggcccgatcaacctccctggagcgcccgatgatccttacatgtcgagcggggctcacaggcgtgggtggaggcgccaccagaacaggatgccctccctcaggaccagtcttcctccttctctgaccacgacgagtgcgtttcttcaagcctccagaagggccagccatgccggccaacgagcatccctccatgtcaccggcaggagaatctgtcgaagggggcttcctggagaccgggcgccacaccagagcacgccgcggagggggcgaggccgtctgccggcaggggcacacgatcgctcggtgcccaggccgccggcagaagaagcaacgaaccaggctccgacacacagctgcacgatgggaaggcgagaaacaattgaagcacttcccgcgcaaatcgacagggacaggcctgggaaggggcttcgaacggttagaagctcgacgtcgagcctggcgaccttcaactctcacccagccatcatcagcatcaacaccgccagcaccaccaggggcaggaggcttcacggccaacagcacatccttgaaggagcgctggacctcactgcgatcctgcgcaacagcagaagacgaaccgccttcctctctccaccgctgagctttcgaatgtccaccgggcaaggaacctggggagcgggagggaataggggaagcagccgacgccggggagggaagggtagtggccgccggccttggagcaagaaccggcgtgaggctgtgggatgaaggggctgaggcgccggccagaggagggagacgaaggggtgggggagggaggccaagaggcgggaggggaagcgccatactagagatagccttattctagggttaggtttccaatatggtaccacaactagtttagtttatttttttagccgccaccttcccttctgtgcccgtgccgacatcggtcgccaccgccaccccatggcggacctccctggagcgcgcccttcactgtcgccggccacagctttggcgcggactagcccgacctcggacttcacggcggccatctcctctccacaggcgccccctctcctacgccgccgtggccgcccacagcatcgccgacagcgccttccccacaccggcggccccctccctagcggcaccctccccaacgtcgccaccatggcccacgcggctgccacgcccgaacatagtgctgccgcagccgactccgttgccggcgcttgtgctgccggactcagtctcccgggctacccgacgtgcacaggtgccctcgcactcgctccgtcgccgaactgtgtctcccggcagccgcccctggcttccaaaccactcgcccaccgatcgtcaacatcacttgggctcccacggcgcccgctgccgactccacgctggtcgctgccatcgccaccatccaggccgttgtaaccgcctctcaagaatgtcaatgcaccgcttccctcgcttgcgagcaggaacgtgctatgggtcaggccttgaccactcagctggccactgctcagcatcttctccacgtccacggcagttcgctcccctgttgtgccaacctggggggggggggggtcccgagttcccctacacctccggactcgacgccgacaccatcgacgcgctccacgcccaagccgctggggttcacaacatacagtccctcgtgtccgtcgtgttggacccgacgtcctcccactaccctcgctggcgcgctcaggtggtcctcacccttcggcggttcgccctcgctgaccacgtcctcaacgatcccgtcgccccgctgtctccatcatgggtccagatggacagcgtggtcctatcgtggctccacaacaccatcaccgtcgagctgcaggacatcatccgtgaccagtcggacaccactcgtcgggcttgactcgctctcgagggccagttcctcgggaatcgggaggctcgggcgctccacctcgatgcctagttccacatgttctctcaggtggacctctccatgggcgaatactgccgctagatgaagggcatggcggattccctccgtgacctccgcgagcctatcgccgaccgcacactggtgttgaaccttctacgtggcctcagcccccggtacgaccacctgaaggctctcatcaagcaaaccgtgccctttcccaccttccattccgtgcggaacgagcttctcctcgaggagctcaccatgacgcttgaggcacccgcttcggccccgacactctacaacgctcctcctggtggtcaggtgtcttccgggggacatgcctctcgcacctcgtcgaccggggcccccgctcgtccacctaccatagcccctacggcccctcatccgacctccaccaccgacgacagttgtcgcccctgtaagggcggacgtgggggtggcagctccacccgtggaggttccaccggccggggtggcgaccagggctagccatcgttctacaacccctagaccggcacctctccatgtggccgggtcaggcccccagtgcctcccgtcctccggctccagcgccggctctcctgactgcacctgccctacgacacaccttcgccgcctgcctacagcctgcctccttacggcgtggcctcgacgacccgaccccgcctcagctcatgcctccggggacccacaccatgactccctggtcgtcgctcgctggaggttgggaccaagcctctcttgccgccgcctacaacaccttggcgttggccccaaccagccctgactaggtcatcgactccggtgcttcctaccacaccacccccaccgcaggcatgctatctcgctctcacccaccccattcctcccaccccgcctcgatcgtcgttggaaacagttccactctgccggtcacttcagtaggtgcctcggttctcctcagaccgttctatctcaatgacgttcttgtagcccccacatcacccacaatcttctttctgttcgtcggttcaccatcgacaattcttgttctattgattttgacccctctggtttttctaaggatctggccaccaggacccctcttgattgctctgacaacactgggcccctatacacgctccgtccttcctccaccggcgcgtctccactacccgtcatggtctccaccaccacctccaccacttggcatcgtcgtctcggccacccaggacctgacgtcatgaccaaacttttcagtagtcttgattcatcttgtgataggggacattttgagggtctctgtcatgcttgtcagttaggccgacatactcgtctcccatttactacctcttctcgagctgagcaggcttttgacctggttcattgtgatctttggacctcccctgtactcagtctttctggatataaatactatttggtgattttggatgatttttccaattttctatggacttttcctcttcagttgaagttcgacacattcaccatcctcacacgtttcttcgcctgggtctccacccagttccgtcgcccggtccgtgccctacattacgataatggccgcgagttcgacaaccacgcctcccgctcgttctttctcaccagtggcgttcagttgtgtctttcgtgcccctacacctctgcccagaatgactgagccgagcacatgattcgcaccaccaccaatatgatccgttgccttctcttccaggcatctctccctgcaagctactgaccgaggccctacacaccgccacccatttcctcaaccgcctcccatcgaaggcgctgaaccaccccacccccacttcgccctgtacggcacaaccccctcctacaaccaccaccgcgtgttcagctgtgcctgctattccaacacttccgctactgctcctcataagctgtctccccgctccgctcgatgcctcttccttgggtactcccctgaccacaaggggtatcgttgtcttgacctcagctcccatcgcatcatcatctcccgtcacgtcgtcttcgacgaagatgtgtttccccttgctggctcctccccacccactgatctcgactccctccttgagtctgatcagagtacccatccccccaggcacttcgcctcgcaccgttgcccgcgcctcgcgtggccccgtcgacctcgctcgcgccacacatggcttcgatgccccggctcgcacttcttcccgcgccacgtgcggccccattgccggtgccacgcgtgacctcgtcgaccccacccgcgccacgcgtggctccgtcgaccctggcctcatcgacgagcgggactcgcttcgctgaccctgccctcatctaccactgccacaggagcactcctccctcggcgcccatggacccgggcccctcgacgagcgcgacccgattcaccgaccccgccgttgtctaccatcaccgcgagccagccatgcccgcggccccggctcctcgctctgagccgtcggtgtaccactcggtcgccattcaccgcgacccaagcacatccacctgatggtgactcgacgcgtcgcaggtgtccttcggcccgttgacaggctgattttggccgctgatacgaccactactcctccggacgcctcctcggtcccctccgttcgcaccaccctcgccgacccacactggcatcgggccatggaggagtatgcggccatgctggccaaccacacctaggacctagtgccacatcccccgggcaccaatatggtcaccgacaagtggctcttttgccacaaactgacttcggatggctccctcgaccgctacaaggcccgttgggtccttcagggcttcaccgagcgccccggagtagactacgacgagaccttcagccccgtcaagttcaccaccgtcacatcgtcctctccttcacccgggactgggcgatccatcagctcaacgtcaataatgccttcctccatggcactctgacggagactgtctactgcagccagcccaccagattcgtcgacaccgctcaaccagatctggtctgccggctgaatcgctccctctacagcctcaaacaggcgccgcgagcctggtacaaccgcttcgcctcctacttggcctccatcggcttcgtcgagaccaagtcggatacgtcactcttcatctaccggcgtggcaaggacgccatctacctcctcctctacgtcgacgacattgtgctcacggcatccaccgccgatctcctacagcagacgatcatcgccctccagcgggagtttgcgatggacctggggcccctccatcacttcctcggcattaccgccaaacgttggccctagggtctcttcctgcaccagcgctagtatgccatcgacatcctagagcgggctgacatgtccgactgcaagccctgctccacgcctgtcgacactcgtgtgaagctctctgaggacgacgggcccccagtcgccgacgcgacatcttacacttgactggcgcgccccagtacctcaccttctcccggcccgacatcgcctacgccgttcagcaggtgtgcctacatatgcacaccccacgggagccccatctcaccgctctcaagcggatcatgcgctacctccgctactccctcgattacggcctgctcctccgacaatccccaacgttggaactcgtggtctacaccgacgctgattgggtcggctgccccgacacgtgccggtccacttccggctatgccgtattcctaggtgccaacctcgtctcttgggccgccaagtggtagcctgtcgtctcccgctccagcgctgaggccgagtactgcgcggtggccaacggcgtggcggaggcctcctggatgcaccagctcctccacgagctccacaaccccctttagcgcgccaccctcgtctactgcgacaacgtcagcgccgtctacctctccaccaatcccgtgcagcatcagcgcacaaagcatgtggagatcgacctgcacttcgttcgcgagcatgtcgctgcaggtgacgttcgggttctcagcgtccccaccatgttgcaattcgccgacatcttctccaaggggttatcgacgagtgtattcctagactttcggtccagtctcaacatctgtacaggatagagttacgactggggggggggttagaatacccgttaggtttggaactctctctgtgtaattaccctctcgccccctctgtaatgggcatggcccaactccaagcctataaatatatcaccccaacctattctagggttagggtttccaatataaatgaagctctggagtcatgtattaatagtaaggattagccatgtgctacctagcaccctttttttctttgcagtggcggatccagggtccaatccctgtggagcaaagctttacacagatatacacaagatagattaattgcatgttaattgacaagtgttatgtaggggtttaacatgttgtggcaaaacctgtggccatgtggccccacaacttaagtgtagatatgtcactgtttctgcgcattgtcctcagacaagcttgtagccagcaaatccctttccattcatctgccatttgctagtgtaagagaatgaagtgcttgttttattgcatagaggagggttacaatatatagagacacagaaaccctaactctaatgggcggacgacccaatagtagtgctgacccacctacacataggacacactgtataacatccccccgcagcgcaacaggggcaccacacacgacgagaatggagtagaagccgaaggtaggagccgacgggttgaaatccccccacagtcacaacgtcttgagggtgcgaatgttgcggttggaggtagagaccgatgtgcactccaagaagatgatagcccctggatgctgaggtagctgaagtcgaggtggcggtggtcgggagacgcgcagcggtagcctgttctttgggagggtcgacgttcgagcgtcaacgattgacggggcgacagaaaagggacaacaacaacaaacgtgaaccttcttgcttctttctacgtccggtggtcgaggagccttgccagggaggccgacggcagcgcacgcgtctgtgacggttagggtggctgcgcccgcggcagaatataaggggtatcgacggatctggccggtaaggccatggcagcgatggatccagctaggaagacggcaatatgactaaagggacggcaaatccagccgagaaggtcgcgacaacgatggatccggccgggaaagccgcggcagcgacggatccaggtgtggcggcaatgaagaaggggtaggcggtgagtcaggtatagccggacaggggcctgtgccgagcctagcagggggttgtgacaccagcgatggaagaagcacgacgaaggtaggaggcactgttgggtggagcaggcgagggaaaacaacaacctactcaccggaacaagaaacatggcgacgcctacaaccgtgggggaggaaggagagggagtgtgcaggccgacaggggaggtctaggtcacgacgacctgccctggaagcggcagggcggacatgccagcgacagcgcggattcgggcggacaacttagcccctgaccttctttgttcacgccggtgcagggagtcggcgaatgagagggcgcgggcccgaggacgacggcgagggagacgcttggccagtggtcggttgctggggagcgctggggaaaggggcgctcggcacctgagcgttagcgacggaagcaggcgtggatccggcagctggaggagcagcaggacgcggcggcggaggggacgcggatccggcggctggaggagcagcaggacacgacgacgactgcatccgggtggaggggccgccgccagctcaggttgctggaggagcagcgcggggaggcgatgccggctaggggagaggggaggccggcgaaggagagggtagaccaggtggtcggggtcggcacccggggcgacaacacgtggatcctggcgtgggtgcccagcgacgatggccaccagggtgaggtgagcacggagagagagtacaccagtgagcataagggatgaagtgcttgttttattgcataggggagggttacaatatataggacacaaagaccctaaccctaatgggccggcagccgaacagtggtgccggcccacctacacataggtgataggacacacactgtctaacagctagtctgtagatcaggaaaaatacagtgcactttcacatcttaagttcttttaaagttctctaatatccttctgttggtaattctttctccacatgattgatatctgcagttttgcatttttctcattccataacttgaactttcgagcataattttgcaatttggtataacctatgatatgaaagtttcagataatggacaggggaaatgtcaaacttgataaaaaaaaccttggtttagctgtgaattcatgtgatcatgcccttgctaaatgtcattaaactattccacttatgttgcatgatttgaacattgtttttctataagcagcactatgttcagtcataattggtgcaaactagaaagaaatgtgctatcctactggtttctgattggttggaatctataagctgacttattttgttatcttgtaaggttaaatatatttagagactaacaaaatccagtcactgacaacagtttgaagtccttaattattcccttcaatcatgtagttttatattcaatgcctgtacctaacaaaataggaaattgcagttggaaaaggaagctattaacaatggtacttctccggggcaagcccatgacattgacataccgccaccacggcctaaaagaaaggctaacagtccatatcctcgaaaaagtggtctcagctctgagacaccaaccaaagaacttccaagtgacaagtcaacaaaaccaaatatgcccttgagcaatgagaatgtactaatggcaggtgatgcatctcttcaggtaattttccctggtattttgctttcctaggaatacatgttatcctctgtataagtatctttaatttcctttaattgtaaactcatttgcatccagaaatttcaaaggaaggagttgtctggaaaagaaagttgctcggaagttcttaatctcttccgtgatgccccatctccatcattttcttcagttaacaaaagctcttcaaatcatggtgcaccgattgaggcaagtaaaacaaaaatccgagatatgaccattatggaaaatagttctcttaaccccaacatgcaagaggatgtaaaggaaatcaatgatcaggagatggaaaggcttaatggtacccaaatcagctctaaatgtgaacactctcatgagggatatttggacatctcaatgcaacaaatgaagctaaagccagagtctgtggagacaacatatgtggacaaacaaaccgcaagagcttcacactccctagcggagagaactgggacaactagcattccggtcactgcaactgaagaaactcattctgttctaacaagtgatcaagtgggaatcaatggaagcatgaacccatccatccatccaatgtttcctgcagatccaaaatttgatagcagtgccacaccacagccttttcctcataattatgctgcctttgctccaatgatgcagtgcaactgcaaccaagatacccacagatcattggtcaacatgtcatccaccttctccagcatgcttgtttccacgttgttgtcaaaccctgccatccatgcagctgccaggctcgcagcatcatactggccagcagctgaaggtaacactccgattgatccgaatcaagaaaatcttgcagatggtgttcaaggaaggagcatagggtctcctccaagcatggcttctattgtagcagctacagttgctgcagcatctgcatggtgggcaacacaaggtcttctccctttcttcgccccacccatggctttttcatttgtgccagctcccagtgctgccttccccacagttgatgttccacgaccttcagagaaagatagagattgcccagctgaaaatgcacagaaggaatgccaagaagctcgaaaacagggacagtttgaaggtttcagagttgccgcttcttcagagtatgatgggagtggaaaaggcgaggtgtctgtccacacagagttaaagatatctcctgtccagaatgctgatgccacgtctgccgcaggagctgacacgactgatgcattcatgaataagaaaaagcaggaccgctcttcatgcggttctaacacaccttcaagtagtgatgtagatgtggacaatgtccctgagaaagagggcaatggtaatgagaaggcgaagcaagcctcctgcagcaactcttcagctggtgacactaaccaccgcagatttagaagcagtggaagcacgagtgattcatggaaggaagtttccgaagaggttgtaatctaccaacactatgccaattcactctgcccaaacctttgagcatgccgcactgcctttctaattcactttttttgttggcagggtcgtctggctttccatgcgctgttcagtagagaaaagcttccgcaaagcttttctcccccacaagcagaaggctcgaaggaagttggcaaggaggaggaagatgaagtcaccacagtggcagttgacctcaacaagagtaccacaagcattgatcatgacctcgacacaattggtgagccaagggcttcctttcccaatgaactgtcgcccctgaagctgaaattgcgccgaacaggcttcaaaccatacaagagatgttctgtggaagcgaaggagaatagggtgccggctagcgacgaggttggtaccaagaggattcgtcttgatagtgaagcatcaacatgagcgatttctacatggttaccgctcggacttcctctgccgccatgaagtttatgacaaagttgtatttacatctaaactagtataggacttaaagaccttgcaatgcaatgcttcatgaaactgttgtgtgctgtattttagtacttgtgaagcagcccggtagactgcttttaaacctttatctcgtagactctgatttaagcatcaagcaactattgaactttatatttttggcgggaaggaaaataattattttttgatttattttgcagggtcatgcatttacatagcactcttgatgcaaaagtttatttcgtaaagttgtagtggaatatgctgagtgagaaggtgaactatttatgactaatatcgtccctgtcctagctaatcgccctactcgactaataatcctcgccccttctcctctatctcgctccactaataatttgaaagtattgttccctgtaattcttgtttgtttctcatgtatgtgcttccattcatttttagtatgtccttagtctttgacagtgccataaataactttaattgtttctgctgtggggtattcatataatacacacacatgagaacctgcgaccattcagtgaagtgctccctatctaccaactattctttaattcaataatcatttcttttagtcttgcatatagatcattctttcatccagtgtttcagtattttagtttttttatactatgaatttgtagagttttcttggttggacctgcaacctttcagtttcagtcctctgttaagaaactagatgggtcggcaattaaacaacaac

SEQ ID NO: 21 - DNA, 257 bp, Zea mays
acagcgaacagcaaagcacctccgactcggagtcgcggcgagagccgagaaccttctcattcatcttcctcttctatccatcctgcctgcctgcttgcctccgtattccagctagatctccgggcagccgattgaccgagaagtttgtggttgtggcggcggcggagagggaaacggggagcgggagggcggcgcggatgccactgctgcgccggcgccggcggggccggtgatgcccgccgtggcggtcgcttgag

SEQ ID NO: 22 - DNA, 89 bp, Zea mays
gccgccgtgcgtgggaggtggacgggggagcgaggcggtgcggaccgaggttgcgttgggttggattcgattgggctgcgtctgctgag

SEQ ID NO: 23 - DNA, 155 bp, Zea mays
tggcccaggctcttggaggacagcaatggatcagtgacatcttgacacttctttcctggacggggatccgacaatttttgctgatttgggatgatgtaagcaatattgtgttaacacaggaggcggatattcacacctggctgcatacttcctct

SEQ ID NO: 24 - DNA, 28 bp, Zea mays
gtaaggacaattggatcaatttaagtag

SEQ ID NO: 25 - DNA, 257 bp, Zea mays
gtctgggcacacaaatttgaactattaacgcattgggagtgcttgtgtgttagaggtctaggaggagctatgaggtactacttccgtcaggtccagcgtttggttggagatatggaaggaggagctctcttgtttatagatgacctcaactccaagtgacaaagtgaacagctgttgaacttcccgtctatttctgtttctttttgctggatttggagatggaggtgaattcctctggtgaggaaacggtgataaag

SEQ ID NO: 26 - DNA, 112 bp, Zea mays
gtaaggaagccatacacaataaccaagcagcgggagcggtggacagaggctgagcacaaacggttccttgaagccttgaaactttatggcagagcatggcagcgcatagaag

SEQ ID NO: 27 - DNA, 62 bp, Zea mays
agcatgttgggacaaagacggccgtgcagatcagaagtcacgctcaaaagttcttcaccaag

SEQ ID NO: 28 - DNA, 223 bp, Zea mays
gttggaaaaggaagctattaacaatggtacttctccggggcaagcccatgacattgacataccgccaccacggcctaaaagaaaggctaacagtccatatcctcgaaaaagtggtctcagctctgagacaccaaccaaagaacttccaagtgacaagtcaacaaaaccaaatatgcccttgagcaatgagaatgtactaatggcaggtgatgcatctcttcag

SEQ ID NO: 29 - DNA, 1375 bp, Zea mays
gaaatttcaaaggaaggagttgtctggaaaagaaagttgctcggaagttcttaatctcttccgtgatgccccatctccatcattttcttcagttaacaaaagctcttcaaatcatggtgcaccgattgaggcaagtaaaacaaaaatccgagatatgaccattatggaaaatagttctcttaaccccaacatgcaagaggatgtaaaggaaatcaatgatcaggagatggaaaggcttaatggtacccaaatcagctctaaatgtgaacactctcatgagggatatttggacatctcaatgcaacaaatgaagctaaagccagagtctgtggagacaacatatgtggacaaacaaaccgcaagagcttcacactccctagcggagagaactgggacaactagcattccggtcactgcaactgaagaaactcattctgttctaacaagtgatcaagtgggaatcaatggaagcatgaacccatccatccatccaatgtttcctgcagatccaaaatttgatagcagtgccacaccacagccttttcctcataattatgctgcctttgctccaatgatgcagtgcaactgcaaccaagatacccacagatcattggtcaacatgtcatccaccttctccagcatgcttgtttccacgttgttgtcaaaccctgccatccatgcagctgccaggctcgcagcatcatactggccagcagctgaaggtaacactccgattgatccgaatcaagaaaatcttgcagatggtgttcaaggaaggagcatagggtctcctccaagcatggcttctattgtagcagctacagttgctgcagcatctgcatggtgggcaacacaaggtcttctccctttcttcgccccacccatggctttttcatttgtgccagctcccagtgctgccttccccacagttgatgttccacgaccttcagagaaagatagagattgcccagctgaaaatgcacagaaggaatgccaagaagctcgaaaacagggacagtttgaaggtttcagagttgccgcttcttcagagtatgatgggagtggaaaaggcgaggtgtctgtccacacagagttaaagatatctcctgtccagaatgctgatgccacgtctgccgcaggagctgacacgactgatgcattcatgaataagaaaaagcaggaccgctcttcatgcggttctaacacaccttcaagtagtgatgtagatgtggacaatgtccctgagaaagagggcaatggtaatgagaaggcgaagcaagcctcctgcagcaactcttcagctggtgacactaaccaccgcagatttagaagcagtggaagcacgagtgattcatggaaggaagtttccgaagag

SEQ ID NO: 30 - DNA, 619 bp, Zea mays
gtcgtctggctttccatgcgctgttcagtagagaaaagcttccgcaaagcttttctcccccacaagcagaaggctcgaaggaagttggcaaggaggaggaagatgaagtcaccacagtggcagttgacctcaacaagagtaccacaagcattgatcatgacctcgacacaattggtgagccaagggcttcctttcccaatgaactgtcgcccctgaagctgaaattgcgccgaacaggcttcaaaccatacaagagatgttctgtggaagcgaaggagaatagggtgccggctagcgacgaggttggtaccaagaggattcgtcttgatagtgaagcatcaacatgagcgatttctacatggttaccgctcggacttcctctgccgccatgaagtttatgacaaagttgtatttacatctaaactagtataggacttaaagaccttgcaatgcaatgcttcatgaaactgttgtgtgctgtattttagtacttgtgaagcagcccggtagactgcttttaaacctttatctcgtagactctgatttaagcatcaagcaactattgaactttatatttttggcgggaaggaaaataattattttttgatttattttgcag

SEQ ID NO: 31 - DNA, 1671 bp, Zea mays
aggataaaggtgtcaggccacctttgcgttaaatgctcctgcaacttggtcagtcggtgtggcgatttagtcagggttgcttctgagcgaagccaaggcctcgggcgagccggaggtgtgtccgccgtaaaaaggggggcctcgggcgagacggaagtctctcgaggtcggctgcccttggccgaggctaggctcgggtgaagcgtgatcgagtcactcgtgtggactgatccctgacttaatcgtacccatcaggcctttgcagctttatgctgatgggggttaccagctgagaattaggcgtcttgagggtacccctaattatggtccccgacaataagttacacgtgaaatcattataagtgtccaagttttaacataatcaatacttctatttgtcattttcatgtgggaacataagtttatcttattatagaatgtttattagtcttataacttatttgcatttcttggccgacactaaatattttatgaatttaaattttttgttgtttctacataaagaaattaataatacacaaatagccttagaaattcacaaaattttacggagccacaagatatgaccacatataattctaaaaatgtttcataatgaaatccacgatacaccatcatttcttctatttcactttcacatgttacataatttacacatgaaatcactctaagtatccaagttttaacataatcaatacttcactttatcattttcgtacatgaacttgatgttatcttctcgtagaatgtttattactattggtagcttatttgtatttttttttgtcgacactagaatattttatgaatttaattgtattttaatatttttcaaaaaaattaataatacacaagtagcctcataaattgatgaaatcttacagagacataacatatgtctacataaatccttaaaaatggattcaaagagtggttaaatgatcacaacaaccgtggtatgtgtgaaatggtgtcttacacggcatccgacaaaaagtccgttatcaacgctatcgtgttcgattaattccatatccgatgctcgactatccatatttgcattaaaaaacatccgcatttacattcatatccgaagctaaccgcattcaaattcaaatttgaataaaaatataaaaacaaatatagttttaatgatatccattcatatccaatcccattatatcactccgatagtccgactccgacaggcgacggcgtgcctgaccacggagggggccccagcctccaggtactgcggcctgctggcgccagcgctcggcccgcccgtcctgtccatccgcccgtcagatattatctgccaggtgtctatcgcagcgtcgtacgtccacgtggaaaagcgcccatgccacgctggataaaaagggtgtccggccaacacccttttctgtccgttcccctctccgtcgccaacccagtaacggcccgcttggcgtgcgtcgccgtccaccgccgcgacctcgagggttcgccggatccccttcctccacctccgcccccgaccccgccgctgcctcaggacgttctgacgctcgcgttcctttgcagtgtagggccgggttgctgaccgcatcgcccggcgtgtcgctcggcgtcggttcgggcaggccgcggccgcgcgcgtgatcgatg

SEQ ID NO: 32 - DNA, 2108 bp, Zea mays
cgtactgctggtagaataaattcaagccgctgtactgtcactctccaaaactccggccagatctcacattctcactcaaaacttgttaccagcgcgcgttgctgccgcgggcacgtgatgccgccaacgacaagccacgacgtcaaaacatgtggacggggccacggcgtggccatactccgctggcagcgtctagggccccgcaacgaaccgagagcgccagataccggaccaccccctctgacaggtggtccctcaccaaagtcacgagccgcatccccaaaagccccccgaaaccccttttcctttttgttttggaaaaaccaaagccccaaactctcacaagtggagagaagaaaaaaaggcacgaaggcgtgcctgcaaaacatgtggacgaggatctcccggtgacttgtagtgctgcaactgtaacgccggagctcgtggacagggatcaaagacctgttgctctcgctctctacagcgaagagcgtgctttgctttccggcttatctctagtacagggaggcacgtgtccggcggtgaggcggcaggacgggtgtgttgtgcttgggcctcggcatcgtcgtggtggcttcgacgtgtcaaaaagcgaagcgacggtgggccaggcgacagcgccagtcctcccagcggggcccgcccgactgcgctttttctactatgcctgcctaggcgagaaggcgagacggcggacggcacggcgcgttctgggcgacccagtttggatcagactgcgcaggaaaaatctaactcagatattttttcagagatatttcagactatccgcactcatggaaccctaaatttctactctaaaaaaaatatctactctatcctataatactccgtgttcatatttaaccctaaatatctaccctataccaactaccacatattctatcatttttttccacacttttttattcccacccacatgcatgtggctctgtggcgcgcagaccgttgtgcatgtggaggagagaagcaatagagagagacgttttactgcaaacgggcaaacggcgactgcatgcttgaggtgagagagagcctcccctatcgcagggagagggatgcagtccctcgctgcagggcattttactccaaacggcgactgcatccgcgcttccagttcgtgagtgcagatagcctcaacaacgcaaagtgaagctccgtgataagcttctcccgcctatcggcctatgactgtaccaggctactgctctgccagatattcttttgccaaattagacatttaaagcgtgtatgtatattatataatctatacgaacaaataattcctcaaaaaactggggcagtttggcccttgcttttgccgagctttatcgtcgatctaacatgctagccgcgtctctagtctcgacacgacggcaccatatccacgagcaaccgcagggccggcacaccaaaggcgacgacgacgacgggaaggcaagccggctcgccgggccggacagataggaacaccccccaccctgtcgtgcgaccccacgacagcccatggttttactcgcgcccagacaggagcggcagcccccagcataattgaggtgagcagctggaggcgaggcgaggcgagggaacccgacccgcggaggagcgacggccacaagaatcgagcggcgcccagtcgtcctccgctccgggcccccgccgttgccggtaaagacggatagattatttcatccggtcccggtggcggcgtgagggcggacggaaaagcgcgcacggaaaagctcctccagcggaaaaatcccgtccgacgtggcgccctgccctcgccgccccttttcttctccgccctccctctcccaaccgctgcaccatacatacagcctttccttccatttcgccccttgcctccctcctctcctctcctctcttctcttctcccctgcgaaaccggcagcactcgcaagggtgttcaggagctggtggcttcgtctcggtggcgcacgctctcgcctcctcctgctgctgctgctgcttgattcgtgctcgtggtgaagagccgctatcagactcggtggctgtggttctgctggttcagaaatcctgagatg

SEQ ID NO: 33 - DNA, 2403 bp, Zea mays
taactgcataaagcccatgaacttattaagagatgccattagaagttgttaaacagagctccgcctctatctcactttcctctagctcatcttagatcctatttggaagagcttcactttaaaatttcgagtttatttcagtttcttctatccaaacagatctaactctatgacctgtaactttaaaaaaactgaaactagagactagtttcatgaaactttcgaagcccctcaaagggtgcttcaaaaatattgtttttataccttcttatgaagctatatcaaaattacctatcataccattggtcacatgacctaccaattcatgtctctttctgcaccctccaatcatcaaggttaactaagaaaactcacacaaattaatgtattacagaaactagagtctacgtgtaagccaaacactctttaaacccgctttaccaatatattggagttgtttaatgataaaggtggaaaaccgaagctacaatttctgaagtgaatccttccaaacatggccttaattaaattgtttgggagtacggttttttttacgatttctagacaatgtcatgttttttagtaatattatagtattttatgttataaaaggtttcgttgaattcctaaaaactatgtttttaaaatcaagatattatagataccatgatatttttacagtattgaaaattttgctctactctaaagtcttcatgacatgactaacctttgccgaatactatggcctacaattttacatataaataattacagagaacaatattgtaaaaccgtatttttgagaaatattggtgccaaacagagccttgagttgagaagctgatacattcggttcggccctgcaattccagacagatggttctggttgcagctcaaattctttggctggaagaagggcgcacgtcgctgtctctgatgagcaggctttagttggatcaaggtcgctgttgctcggtttatatggtccagtctaaatccgtctactgcttctatgcccaaaaaaagatcgatccactctctcgtaggatttgtttttgggaaggaaaaaaaaacaattcatatgccttgagtggaaaaaaatcgaaatggaaatgaaaggcttgctaattatcaaaggacattagctaagctctgcacatcactctaagtctttacccctactagtactacctaaggtattaaaaaaggagaataaaaaccaaaaggaaaaaaagaagaagaagaaaacttgtggccagggatgctttggcagcgtaacgttaacgacggccacaagttggggtggggtgggtggtgtgggccccgccgcaggatctttctgggcctcgaagctggccgcgtgacgtggcgccgaaaaagcgcagcgagaaatacttgtggccacgctttttgcggccacggatattcttcttttctttccctgcacaagcacagcacagcacggtgcacttcctatattattttacttttctgttacaaaaaaagagaggaaatgctcttggaatttcttgtggacacgacacagctaggaatttatccttctttcttgttcgtttcctttttcttatctagtaacgagaaaacggtccgggtttatccgcggaaaaaatatctgctatttgaacggccgcagatatttgcggtgttttctcttttattttctctacgctgcttcgtgccctattgtcaacacgtggaaaccttcctatccactccaatcacttcactccacttctcaaattttcagaacaaacttctaaatttataatgaggctcaatgaaatatttaatttcgatacaatgctatagataaacaaaaccaccctgagaaaatggggaaaaaaaagagaaagagaccctctatctcaaaagggaaaacagaggggtcagaacgtaaaatatccgcagagggcggaggtgggccctcccctcccggggcctccccagccactcgatccctggcccttctcgaaatttccagccctgacaggcggggcccacggccgacgtggcccgcctcccctcccctcccttcgcccccagaaatctcgccgctcccacccctctccttcctctcgccatttccatttccttgcccttgccagccagagcgagactccaccgcttcctctccgccgcgtcctcctcccctccctccgttcctcacggctctccggactcgccccgcggctggccgtgctgagtttcgttctctggccggcaaagaagcgatttttttgtgctttctggacggatcccggccggagaagggaccgaatttccacgacctcgaccgccggctgctcctctgctgggctctccgtgcgcaagaagagcctaccaaggtgaatccggagatttgagctccgggcccgcctcatg

SEQ ID NO: 34 - DNA, 3287 bp, Zea mays
agcttatgcattgctaaagaaatttgtagtaacaatctacactttgttttgggtttgcgctctccttccttcgatgcttattagtcattttgcctagagaagcataaactacctgattgcgagaggagttaagagattgactcacagagaaacccatatgttgatctatatgtagtgaggcttatgtcagtcattgtgtgcagcatttggcatgcgtttcttgattttatacactctaaatttgccattgtactctttatttcaggttgttagagataaaaggactggcaaaactaatggttatggatttgtgagcatttaaaaccctactgacatggctgcaacaataaatgagatgaatagtttgtatctctcatacaggacgttagaaaaaataagcaataatcgttgctagctaccagaataataaaaatagaacataagtagtaatcgttgctagttaccagaatacgaatttctagttgcatgtgaatgcagactgaacagtcatggcctcaagccataatccaagatgaatgcagactgagagtgttagcacctatttcatcgcattgactaataattatgtcatcttaaaaggattgttagaacatattagaaccttccctcatgatattggaaaaaatccctataccatctttgtttaggatgtaaatatttgtgctaatctttttggaagaaatatatgtgctcagttaccagtgtcgctatttatattagtatatatgaatgagtctataaccttacacaatctcgggcacgggcacataacatgttcatacaactgcagagtcatctagggatctttaagcttataaccttaaacaatagaacatagatagattagatttaccttatagtcctcaatgaagagatcagttcagccacttcaagttcctttgaaatacctttatgttcatttgtgagaacaaaaataacattagaagaaaagatgaaggtgtctctactctctactctctagcactgtgtatgacagacagtggactaagaaatgattcacctttttctaatctaaagaaaagtcatactcatagtttataaaactaaaccatacaagccactcgacagtgttggctaggattgctctaatcacacaagccagttaacaagtagtggcaggagtgttgattcactggaagtaagctaaacctaaagctgcattaaaatgatcacattaaacttattcacatagccaacaaagccattaaaccccaataaactggcagtttctttgcacaccaattaaactggcagttttcttgcacacctctggatgactcaggctttatctatgtttttcataatcataaatactggatgtctaggaatgctttccttggagtaaatgtaaaaaacaaattgctagtacttcaaagacacaactaaaccactgtgatgcatcaatgctactttgtggtagaattattctgaattccaatgtttatacttctaaatgggcttgattggatagttgcacatgtacggacaggttggacgcgccctggccggctggatatggtagttttaggcgtacagacaggtgcagattaatagctttaaaatgacttgttttgcatccactgatgcggactgcgtctcccatgtacaagtaactaaacataagctcaaacaaagtccacgagtgcggtggcccgagataagttgatacaggaaatgtggtttgcttcaccaaattgttagtacattagtggattggattacaaacacaacacacaaagataataaaactctaataacacaatggtgaaggtgctcccaaattacaaaacacataacacaaaaattgaaaatgcagcaggttaggagacaactaacacatgcaaaaattgatttctttaacatacaacagggaggtgcacaatgaatttgcctgatgctcttacatgttagtttgattaccagggtactaaggacttgacttgcaatgtgaaaatattgtggctacccagaaatcataaagaggtaaaccctaaattgtacatatgtttctaccttcttctaccttatatcaattacttattgagcacaaaggagtatattacttaccctaaactacacatacccctaatataatgttacaggttggaaacaaaggaaaaaaccaatgtgtgccactaatagttttacctttcgatgatatgaagagagggccactcttaaatacctgccagaaaaccttaccaaaacctgtaaacagattgtcttatatcataatgatgaatttgagtgtagaaaccataccaaaatcagggttcctacagatgcatgcgtcgtggatccacctacacgtcccaacttcacttcacatgtgtgttgattgttggtagaaccccttccattttatacaggcacgcgggtggaggagcactttttgcagtaggtccattagtggatagcctacaacagatgcaatgcaattggaattggtcatgttcttgcttggtgagaggtggggatggatatgtagatatgcaagcaaggaattaattaacgatgtgcatagcagtaccctgaggccttgttcggttattgatattacatgtgtattggagtgtattgggtgggattgtgatggattttgacttgttatggatttaaaccggctcaatcccacccaatacatgtgtattatcaccaaaacgaacaagccctgaagtgtatctggtggccatgttcttggcggccttgcgtgccttgtggccgtctccttcgagagctgcttgaagacgaagcactctcctttgcagcggatgtacagcccagtcccaccgcagtccgggcactcctctccctctacctgctcttctcgttcctcatgctgccgccgtgaggcgatgctgggcgaggaggagcgaatcaggaggcaggcggcgtcgactgtcccgatgaactagaaagatacacatgatccatttcgatgaatcagcaaaaaagacttcattgattatgcatttgacaaatagcaagaagcgcggggcaacaaagcccatcctatctcatccatttttttcccacgatggcaagtggcagctcctgattagctacgcccattcctacgtggcacaccccaggattcatgtgtgataggccattggggcccacgaggagccacgtcagatgccaagccaccccggcgagaccaaccggccaatcgcagttcaggaaaaagatgacctgctatccaaacccaactgtataaaatgtagctgctgtgttctgttatg

SEQ ID NO: 35 - DNA, 9280 bp, Zea mays
tggcatcaatcaccaaaaagggggagattgaaagggaattaggcttacacctagtccctaattttttttggtggttgaattgcccaacacaaatatttggactaactagtttactctagtgcataagttatacaggtgctaaaggttcacacttagccaataaaaagacaaagtattgggttcaaccaaagagcaaaggaacaaccgaaggcacctctggcctggcgcaccggactgtcaggtgtgccactggacatgtccggtgcaccagaggactccgacttcaaactcgtcaccttcgggaaattccagaggcgactccgctataattcaccggactgtccggtgtacaccggacatgtccggtgctccaaagaagagctgcctcaggaactcgtcagcctcgggaaatcggaacgtctgctccgctataattcaccgaacatgtccggtgtacaccggactgtccggtgcatccacggagcaacggctacttcgcaccaacggacacctgcatgcgcatttaatgcgcgccagaagcgcgcagaagtcaggcacgcccatactggcgcaccggacattgaacagtacatgtccggtgtgcaccggacacccaggcgggcccagaagacagaagctccaacggtcggaatccaacggctttggtgacatggctgtcgcaccggacatgtccggtgtgcaccggactgtccggtgcgccatcgagcagacagcctcaccaaacggctagtttggtggttggggctataaatacccccaaccacccaccattcattgcatccaagttttccacttctcaactacttacaagagctctagcattcaattctagacacaccaaagagatcaaatcctctccaaattccacacaacgccctagtgattagagagagagatttgcttgtgttctttcgagctcttgcgcttggattgctttcttctttcttgattctttcattgcgatcaagctcacttgtaattgaggcaagagacaccaaacttgtggtggtccttgtgggaactttgtgttccaagtgattgagaagagaaagctcattcggtccgagggaccgtttgagagagggaagggttgaaagagacccggcctttgtggcctcctcaacggggagtaggtttgagagaaccgaacctcggtaaaacaaatccgcgtgtctcacttcattattcgcttgcgatttgttttgcaccctctctcgcggactctattatatttctaacgctaacccggcttgtagttgtgattatttttgtgaatttcagtttcgccctattcaccccccctctaggcgactttcaggaagagcaaagacttgtcaaaggccgaggcagtcaatctttcatcgtcggagtcagatgaggagcagtcagaaccccactcctttccaagatgtgcctcgcccttcgccttcttgtagtttttcttcttttccttcttcccgtacttttcttgtccctagtcattatcgttatcggggcattgtgctatgaaatgaccagtcttaccgcatttgaagcaggagtgctttccccttgttttattcttggaggggtactctttgcgtcctttgagcgcggtcttgaagcgtttgatgatgagtgccatctcatcttcatttaccccggcagcctcaacttgtgccaccttgcttggtagcgcctccctgttgcttgttgctttgagcgcaatgggctgtggctcgtagacgggtagtggatcgtttagtgcatcgtccacatatcgagcctccttcaccatcatgcgcccgctcacaaattttccaaggatctcctcgggcgtcatcttggtgtacctggggttttcacgaataagattgacaagatgggggtcaataaccgtaaatgacctgagcatgagtcggacgacgccatgatccatccatcttgtgcttccatagcttcgaatcttgttgactagggtcttgagcctgttgtaggtctgagttggctcctctcccttgatcatcgcgaacctccccagcttgccttccactagttctatctttgtgatcatagtgacatcatttccctcatgtgatatcttgagggtatcccagatttgtttggcattgtccaagccactcactttattatactcgtccctgcaaagagatgctaataacacagtagtagcttgggcatttttatggatttgttcattgataatcacagggttatcagtgctatcaaaatgcattccattctctacaatttcccaaatactaggatggagagaaaatagatgactatgcattttatggctccaaaatgagtaatcctctccatcaaagtgtggaggttttccaagaggaacagaaagtagatgtgcatttgaattgtatggaatacggaaataatcaaaagaataattttgattgaccgtcttttcctttgatgaggagtcgtcgtcgtcccttggtgaagaagatgaggcatcgctgtcgtaatagatgatcttcttgatgcactcttcttcttcccatctctcttcttatgacttgagccagagtcggtaggcttgtcgtctcttggctcgttaaagagagactccttctccttatcgttgaccaccattcccttacccttaggatccatctcttcgggcggttagtccctttgatgaagagtacagctccgataccaattgagagcacctagaggggggtgaataggtgatcctataaaattaaaaactaaatagccacaaacttgattatcaaagtgttagtaaaatcaagtggctaaggaacgcgtttgtgagaacaaagcaatcacaataagcaacacatgagacacgcgattttttatcccgtggttcagccaagtaacacttgcctacttccatgttgtggcgtcccaatggacgagggttgcactcaacccctttcaagcgatccaatgatcaacttgaataccacggtcttttcctttagagtattcttctcgtttgcgaggaatctccacaatttggagtctctcgcccttacaatcgagatcacaaagaaagcacagagtaaggttggggagagcaacacacacaagactcaaatccgcagcacaacaacacacacaagtgagaacgtgagcacacaaacacaacgcgagaagtttacaactcgaatagtgctcaaatctcaagaatgatgatccgattgcgtgaaagcaaagtctagatgtcttaggatgtttcttgtaagcttggtattctcctccatgcgcctaggggtctcttttatagccccaaggcagctaggagccgttggaggccaacttggaaggccaaacttgccttctgtcgggtggtgcaccggatagtcactgtagctgtccggtgcgcgatctccttccatatctggcgcatccgaccgttggtcctcggggtcggttggcgcaccggacactgtccggtacacaccggacagtcctgtgtgcccaaccgaccgttgctgcgggccacgcgtcgcccgcggattgcgcagccgaccgttggcgacgttggctcaccggacagtccggtgaattatagcagtacgcctctgcgttttcccgagagcagccggttcaccgtcggccagtctagcgcaccagacactgtccggtgcaccactggacagtccggtgtgcctggccagagttggtgttggctgcacaaagctaactcttctccaatttaattcttcttttcttggtactgtttctagcacttagacaaacacattagtatacaaaataatgtactaagtctaggaacataccttatgctttgatttgcacttttcacacattttgcacataagaactcaattaatgtgttgggcatttaatcaccaaaatacttatagaaatggtccaaaggcacatttccctttcagaaattttatacccccaaattcagggtgttacagtaataagctaactgtattatttttatttgatgatttttatagtgttatataaatgcagaccatctattcgttggtagacacctagaggatatggattatcctgtgaatggaagacattcacaacctagctcagtgcgcactgatgaggctagcttatcggaagccctttattctcgttttgggatttcacaagaaatcataagggtgcataagaaaatgacttcatgtcaactggagaattgtgttatttaaaagctacaagtgtcaacacatacatttgagcaattgtatatgcgctccaagtgatccaaaagactatggccatagcagagcacgagtatgctcaaattggatcttgttgagtgatacaatatggcagagatagccttgctcaccggtaagaagtgttaacttattttcacttcaaggtatattattgtggatacaagtttgttttcatggacttggaaacaatgaggtggtgagaaagcatggctagtagcaactgggtttatacgcaaacccaatcattattctaatactataaattctcctctactatgagtagtaaaattctgatgcaatattatggacaataaatcatctatctatgcagttaataggtgcagtgacaacatatgaatatatgatcactaaattatggtatttgtggagtcttgaaggattccaaatacataatcatcaatcacaaatttgcaatgcttggaaagtctttgtgacttagagcatccaggtcaaatatggtacaatcgacctagtgaatccttcctttcaaagggatacatgaagaatggtatgttcagtgtaaatatgtgcaacatattttatggagttcgagatagaggatatgaattgtaagagattttcaattcaaagtaaactatcttgagtatcttggatacaaagttgtctatatccaacatatattgaagaaattcaatataatggaatcatagttatttgattctttcgcatcatgagatgtgctattgtacattgcaagagcatccgattggatattgctttgcaatgatttgctagctaacagcacatgagatcgagttatgttctctatgagtacttatgatctggttatagttggatatactgatcttggatatctatagaagatcctcaggtacaagatcaatgacatacttctggtaagttggacctactgtttgataaatgatgatcaatagagattaatggtcacttacactaatcattctatagcacacttcgtggaattgtatagaatgatatactacatacataggatatgtggtggtcatgattttctatcactgaccttattatctatgaagataattatactttgtgtggtttagatgaaagacaagttacgaactaagtctctaccttactccacatttttaagtgtgtttgagagtaggtataggatgacttagtgatttgcaaagataagtgggggtttcctcttgatcggaagaacttgtttctacatcatattgtactcatttctttgcatgagtttttcccatgtttgggtttctcattcaaagtttttaacgaggcaacatcaacacaagacctatgtcttatcatctattttttcccgtagaggttttcgaggatgatacattatgacatagctattgttgtatttgaactaggttatgagtttatctccctagagttcaaatagatcaacaatagggtatgaccactctccttatttttcccgttggattttttaggagacttagctgatatgttgatttctcagattttctgataagattatcttggacaaatattagcctgagttatatgtcttatcatttattttccctaagggggttttgagatgatgaatatagacatatcattgttctttgggctagaggtccatgggagagcaatggcataccatggttcaatggaaccaccgataattatctataaggatatttgagcttgtgttgttcagatggaaacatttatattaggagcaacattaataagcatattgctcctaaattgttttatccccatgaacttcagaaaatggagatataaacatcttgcaaacaaagtcttgtgataatcttgctgatctattcacaaaatctctaccatactccatgtttcagaaatgtgtcgagaggattggtatgagaagacttaagcgattgcaagaattagggggagtaattctccatgatatttgactgttttgaaccatcatattatactcttttctttgtatgagttttgccttgttaaggttttcttatccaaagtttttaacgaggtaatatcaactaagctatatgcttcgtcattgatttttttcccatggggtttttaggaatgatgattacaggcatatttttcttttggaaatcagtgcgagttctactcatgatccaaaagacattgtgtactccttatttttcccacaagatttttgatgagataatatattggaagatagctgacagatgatcaaattgactttgattgattaagggggagtgtcacaaaataacatattacaaagttatatgtgatatagtgatcaattcaaggggctcggtgaacacatccccaaaaaacatacctcttgagaatgacccctattatatatatatatatatatatatatatatatatatatatatatatatatatatataagtaagtctttcatgcaataaagtacatacgaactctcatttgtcattctctgcgatctacagcttgttcgctgcggcttgctgcggctgcggcttctacagtatttttctctctatggattgcagctgcagcagtccaaacagctgcaacagtgtcgcttgtagccagccgaacacgcccctagttttttcactgctctctgctgagctcgctggcgtcgccgtaaccgcgaataaagaaaacgccccgccatgtcacgtcctaccgggcagataagccaccagtccaactcgcgggccccacggctccctcgcatcccacaaatccagtcgccacgtgcacgccctccgcaatcacaaaggcccagccccggggccccacccccctggtgcgcttttccgccacaggctctcagaatctttacacccgcacaagcgcccttgccggctcggccccacctggccgcttcgtcagccgcacgatgtgacggggcgcgcatcgccgccgtccaaggcccgcgcgacgctggccactagttcccgcgcggggatcggacggtcgcggctcgggagcgcgggcggatcggacgctcccggtggcgtcgcggggagagggtgacggtggaacggaggtggagaaacggcggccacaggctcgcggcgctcgccggtgccctggaaaaagcgcaaggggagccgctagatcgccgccagttggccgccaggtgggccccgcgtggcgggggcgcaggccagttcgggcgtttcccaaccgcaaattattcattattgtctgtgagtcctgtgaccttttgcgttttgcggaagggtccctgcttaagcctggatttgcacgtggctaccgtgggaggttttctggctgttatttttcggttcaggtaacaggctttgtaaattagtctctgctgattaatcttctctctattctattttctattttataaagtagcagtttacacggttgccgcgcgttaccctttcacttaccgcgtttcaaatctcggttgttggctccacattcacaattacctaaccaaccgaatacatatatttttatgttttactaaaataaaatctactcatgcgatacatagaacaaaaaataagataaaattacgtacaagtagaggttcaaccttgattgttatttccacgttcacacccatctatcaacaaaacccatatttttttgttttattaaaataaaatcttcacatgtgatatataggaactattgtaatatacatgcatctgactattgtttatgtattcttgagatgagaatgctccgagagatagaaacataaatattattagttagttgccgtgaatcccacaatttctatatatgatatatggttcttcgtataatacaagtatacaacccaacgtaacctgtagtggttagaggcaaatactctcttcttatagaccatgcttccaatcaatggacattttttttgatatttctctaagtggggaaggggacggcacacgacaattctggggaccctcactacgcgcgtgggaagggacaacacacacaatggaacttccactttaaggtgtagtgaagagaaattaattttctctattttatgttaactagacacaaatgatacaaatcggacaaaaccaaaaaatgaacttatatgctcaaactagtagctagatagccattctctgtaaacatgacgggtgatcgtacatggaccctcaaactcctgcgctattcagagtgaccctgactataatcctcaagtaagtaccactacacgcactttccaaaagctgagcagcaggatgagcgtgaccaatcttcagcttcagctccttcgcaaatcaagaaccatccatccattttgttccgttagagcgagacaccgacggatgcagaaatggtcgtcagccagcagcaccaccttgccctctgcataaacttaaactattctcgctcaaggctgcaattccggggatgctggagggcgtgctcgcaagatttctggggccggagcgcgagaaatccacaagaaaagatagtggcccagatttctcgcggcgctcgccgcgatcgcgacccgcacaggccacagcctctctcccctctgctcccgcggcccgcgcagcgcacagcatacagcgcaccgagctgcggccaccgcagcgaacagcaaagcacctccgactccaagtcgcgagagccttctcattcgtcttcctcctcttccacccatcctgcctgctcacttccgttccgtagtccagctagatccccgggcaaccgatccaccgagaagcttgtggttgtggcggcggcggagagggaagcgggaggtcggaggtaggcgcggatgccactgttgtgccggcgccggcggggccggtgatgcccgcttgagctgggtgggaatcgggcctcgttttgcgctgcctcgtggcgttccctgtgattactgagcctcctgacgctcgaatgggtgcgcgggttggtgcaggccaccgtgcgtcggaggtggacgagggagcgaggcggcgccagaccgaggttgcgtcgggctcgatttctactgggctgctgtctgctgaggt

SEQ ID NO: 36 - DNA, 14052 bp, Zea mays
cttgatcaagtaggatgtaggacgacacgaatatagtagagagattggaatcagctggtggatcaggcaaccttgcacgcaaactgaaggattattgatgacccaatcgatgaaataggtgaatgaatgccaacgatccatgtaaggaacgatgcaaggccactccgtcctctactcgtgagaagggcatggccgtatagattgagagctctcgcaggtggaagcttgtagacacagaggcccagagagcctattagagttagagatggcaacatggaaaatatctgtcctcgttcccattccccgcgaagaaaaaatgttcttatggggatccctacgaacgctcgcaggagacatttcttttccatcctcattctccacggggataaatccccgacggggatcctcgctcatccccgcttaaattataattagaacatatattatttgttattaatataaacattatcacatatatatattgtcatatataaaaaatcattatgtgtacatcaaaatgaacacatttgtaacattgagtggtctcttgagaatgtattatttatttttatcattaactagtacacgaaaacaacatcatgtgaaagtctaacgggtccccgcggggaatggggacgggaaatgcttcttcatcccgtttccgtttagccgtcaggggaagaattttccctgtttacatctctgtgagaaaaaaaaaactttctcatcacgtctcctaatggaggaattccgtgcagggaatcagggtcgggggccattgtcatctcgcacaagccgcagagacaacatagcgaggtggcaagtcaggttttatcaggatcgcagatatgacagaggagccgatggagcatccacaaccacctaccgtccattggtcatacacttggaccttaggacttgtagcgcttcgagggtatatgagcttaggtttgtaccctttttggttgagagggatcctagaaagatttttaacatcgtgttgcattgcacgaggattgaggatttccattcagccgtgacacatagcgcgatcgccctacaaccacatatatagagtatgtcccttaggggacactgtgtcagctagagtagagcagacacacccctacctcacctactttttttttaataatggaaacatagtccgatcttgacctccaaagaggttaccaccaacatttacaattgaaggcagcttactgccttgacacatcacatgactgcacccaagaccacctatgacataaccaaaggtactataatgttaatcgccaagcgatttccccatccaaaattgcgaaaaactttagtagcaccatctccatattacgacatgaaggctttattaactctttatcctccatcttaagctgaagttgtgcccagaaggttacctgcaaacaagatttaggagaagatttattgaaaatcacatcattcatacttaaccaaatggcccagcaaattgcagatgctgcagttagtagtaaacgacgtgatttgactggtagcaccctcaccaagtccccaaacaaatcattcgcatcccgaggtggtctcaaccctgttcttatctgaaccaaacaccagatgaaagacgcataagtacacctgaaaagcaggtgatttattgtctccagtctgctacaaaagcaacaggtctgattaccaggccaattcctcctgaccaagttatcctttgttaaagttacacctcttttgaggtaccacataaaaacctttattttcagaggtatcttaagcttccaaaggtcattgttatcactaaccaccccattgttaagaattgcctgatacaaggactgaacagtgaacaacccattagcagtcaagtcccatctgaatgaatccatgttagtattcaaattattatacgccaccaacgccactagttcaaaccattgaaccctcaactggtgcaccaatcccctacggaatgatatatttaagggtaccgtggagaagtcaaaagcaacagttgaattcttcctccttgcaagattatacaaaagagggaagcaggattttagcgctctcaacccaagccaattgtcctcccagaaacgcgcttgggacccatcatttacctgaaaggtacctttacttataaatagatccttaatcttcataaggccactccaaaagtgagaatccgaagccctacctgacctacttgccaaggttggcagacttttagggtggtatggtttttttaacgtaatgtcataatctctatctctgaattaagaagaaatagaatcaaccatgttttaaggaaaaatcggacccaaaacctagttcagaagttctatatctcactctagatacagttggaccagagtactttatgttcacctttggagggaggcctaacatgtttgtgccagtctagtcacagagcgctaggttggggtctacagagactactaccaggttatacaccttatgctacagaaccatggaccctgacaccctcatagtgaatacgcttcgagtatggatagctcatgtatagggatggcaattgggaattccttgtcgaggaatagatctccatactcgtccccgcgacgtaaaaattttcccgcgagaatccccacgaacgcttgcggggacatttcttctccatccatgttccccgcggggataaatcccgacgggtatccccgcccccgtttaaattataattaggatatatattctttgttattaatgcaaaacattttcacttatacatattgttagatgtaataaatcattatgtgtacatcaaaatgaacacatttgtacaatgattgatctcttgacaagataattatttatttttattattaactagtacacgaaaatatcatcgcgtgtaggtttaacggatccccgcggggaacgggaatggggaatgcttctccgtcccatccaagtttacccgtcgcgaggggaagaattttctccatttacattctcgtgtggaaagaaacttctccatctctgttccctaaccgagaaattccccgcggggaatcgaggatcgagacgcattgtcatctctactcgtgtagctattgtcttctaaccccgttcggagatggctcaagacagacaccaggtgacttgacgctagtcagtcatcttctaactgatgtgatgaggagtcaccaaacaccaaaattatacagaacaccgacaacaaatcttatgataccaaagctatacatatatatttccaaaaactgattgccaaacacagaagtacttgattttggacaaatctggaatgacaactactgtatatgaaatgcagcgagtaactagaagttcacaatgatgggatcctaaaataaataattttatgagctttaaaatttatctaaaaaacaacattctataaatttatgggacactatacctcctaatgcggaggctaatcacaggtgcatacaatattaactactaaatctaggcgatatccttcggaaatgaaaaggagattgaggtacatgcatccttttccaggcctctttaatctctcctaaaattttcacgaattttatttattttgggacggtggaattacatatgtacttcaacaaatggcgtgaacctctctagtccttaatggttcgcgtgattcctgtgtggtggcccaatttaagagccagacgtacatagaaggtttcaataaacaattgattacatcctaaaataaccaagcagaaaatgtaactgcgagagagaactaattcttttccaaacaactagtccctgatctacacatcccgatcaatatataagtatggccgcggcgccggaacagaattacagaaacctagcacccgaacacaccacgtccaaacataggagcaagtgagcaaccaaccattggaggcacttaattagcttgtggtgctcatagctaggaatcatacatgggcagtagtagagctctgttcttggcgaccgtcatggccgtggccatggccatggtcttctcaccctactaccttgccgtgcaagggctaaaaggtcgtgcatacattattaattccttaatttatattcaatatcaactttgcaaaggatgtctgtatataacgtcttccttagttttgtcgtagtgcagtaaactgtttcgacttgcatggagggaaatgcgacaaagagacgtgcaccatggtttgcaaggcgaccgggtacgtcgaccctgtcgtgaaatgctccaacccccctgggaaaagcggccagtgctgttgctttgtgaagtgctgcgggggagatgcttcggttccaagcctgctgtgagactcgtacgtattggtagctagctatatacgctgcttgcgtgatctgaataaatggttgatctgaataaatggttcctaataaatctttgactattgtttcttctcgttaattatatatgtacagaacgtcagcaaattttgtaatgctattgaagttcatatacgaatcttgtcgaagtcattccacatatcagatgtggaagctctatttcttacccgagaactagtaggtgtgtcctcttgtcgaagtcattccacatatcagatgtggaagctctatttcttacccgagaactagtatgtgtgtctgtctcctcgacctctgccacatcagggtcggaatctataatgataggatcagttgaaggaattgcaacctcactgccaccgatttggccagccacggtgtcgtcatcggcgaccatcaagcacgtacaaatcacaagcacaatattaacaacttatcaaagtcggagctccagatcgatccctcacgactataaacacagaacaagaaggcactagattagggttcgaactcagatcacaagtacatatcataagcacaagcaccaaattaagaacttaccaaagttggagcaccatatcggtcccctcacgactacaaacacagaacaagaaggcactagattagggttctaacacatatcacaagcacaagcaaaagattagcaacttaccaaagtcatagcaccagatcggtccctcacggctacaaacacataacaagaaggcactagattagggagcacaaacacagatcacaagcacaagcacaagattagcaacttaccaaagttggagcacaagatcgattcctcacggctacgaacacagaacaaaaggcactagattagggttcgccggttcgagcacagatctagaggcgccgagggaggcggtgctttcacaatcgctagagggttcgagagagatcgagtgagagaggagcttgagagagagagagaatgagagaggaggcggggacggtgtggggggcggaggtcgcggggctatgtgtttatggatgttgtgcatagtcgtgcttctgacctaatcgggtcatgcccatgctgtcccattgtgccccctcgccgccccaagcacgtcactagaggtcggactgtgccggcacggacccgcccactgtgtcgtgccccggccagtccggttaaccagacactattgaccatctatagcaccagttaagtagcaattataagatttgtcgattttttattaggccagaaagagtatattgagaaacaaactacttctactcaaatattagagtgtttggttctatagactaaagtttagtatatgtcatattggatattggaatgccaagtacgagcattagatataatcaaattaccaaactactccctctgtccggatgacttagacgttgtaggtttttaagacatattaaggaagaagcaaaatgacacatgcaaccctgctttgttttgattaagcgttgattacaacaaaaaaggtaattaatactcaacgccttgattacaacaaaactaggttgcgacgagtgatttggccggtggtggtgggaatatgagatgcgaactgaacggataaggatagagatgacaccttcacgctgtgtgaacaaagaagctgggttgcggggtgcgtcaaagtgcatggacaagttaagtgggttaaaacgcctaagtcattcgaacggagggaagcaaacactctagtattaccaaactagtaattacataaatgacgaaacacatttgtaagcattattttaatttaggatcagtaaaatgtttactgtaacattacttgaacgaattataaagtaatttggtttaatatattcatcttatcgtttaattcttatctgtgtaattaattttataactagaaaatatataatacttttaactaacatatctctattatacttaaagcaacagtttcaacggccgtcatatgtcatatttttacgaataatctctcacatctatctcaaattaaccatgcatctctgcatgcaacctccacgtccggcccgttagccagaatattaaaaaaaaggtgcagaagatgggatttgaacctaactctgatggaaaaaggacaggagacactaagtgaagtcgtctaaccaataaaacatcacggtcaattgtttttaatattaaatgaattgtacatatgtatatacgagttttgtaaaataaaaaatatataattgtgctggaccggatcagtactacgggccgaggctacgacccaaacacgacacgacgatcgtgtcaggctggcccagacactattaaatgggtcgtgccccggaccagcccgctagacatagcctatttggtcatttatacctccacacgataatgatgatcctcacctcacttgtcgtcacctcgttcgtcatcctgcttcttttctctctcctctcatgcttccgcctccgcgccacccattcttggcagagggcgtgggagctagggatggcagcgggtcgggtaaagtgcgggtaagccatttacccgcccgccagcatatccgcgtctctggtgtttacccgtacccgcgagagcgcgcgggtaaaattttcgacccgtatccgtacccgcaggatatccgcggatatcgggcaacccgttacccgccagaaaataacatgcgtgtatgtgaccatgttcatttcactaaatgcatcaacagtttgacagacataatataatggcatataaggaacattgatcatccagaaacacaagtctcaaacatatcctgataatgagtcattacaatatttgctaagataaaatgaacgcacatataaattccacacactatttgtctgactctaacagaaatgcaccatctagcactagcagtacaccaatccaccatccagattccagcgaccaagttccaataggcaacagtccaccaatccaccatccagcagtccatccatctcacaagtcatggtataatggatcatgtatcaatgatttcagactccaaattttcctaagagcaaagaatacatgtacagtaaggcaataaaatagagggaagaggcatgtcatcaatgcaggttatagtaattaccaagccttcttcttcatcatcaagacatgtcatcaatgcattaagagctgaagattccgggcctaatagaataaatcattcaaagttagtgtgattgtaaataaaagaagggaaacaaaaccaaatgaactacatgttatacctaacatatcagctcgagaccaagcttgcatacacattaaagcttccaccatgtttggggcaagtctgctacggtgtgggctaatgattctcccactagtactaaagacggactcggatgcaactgttgtcacaggaattgataggatatctcgagcaagctttctcaaagtagtatacttcaaccctccaactttccaccaatcaatgacatccaattcaagagttcttggcagcatatcctcttccaagtacatatccaattctgtgcacacaaaagatgtcggcacagtttgttcagaagccatgtacttatcaaatatttcattcacctcagcatcaccctcatttagttctttattgctactaccaccagccacaataccatcagttgcaccaaaaccttccatggaaccttcaaattccttcactaaatctattaacaaatctttaattttctttacttctccaaacatatcctcaggtccatatatttgggtgtacatggcatacaagaacttcattttacgtcgaggatctagaacggtggcaacagccatcagaccatgaacatccatccaatacttcataaacttttccttcatggctgctgacatgctttctatgatagagttgtcactagcttcccacttttgaatggccagataaataccacacactttggggaaaaataagttcgatgtgacataagaagtaccagatagtaattcagttgtatcatagaacaactttaacctatcacatagatacctagcaaattcccaatcttggtctgtaggtcgaaaagaaaaacataatttttctttctttgcaaggcgatcaaacacatgtatgtaattcagtgcaacattaagcattaggtacgtagaattccatcttgttttaacatcaagagctatttttttatcatatttaatgccttcttgtaaaacaaccctttcaaatcgttcatgtcttttgggtgtggctgaccaaaaggcgatagtttcacggatcctccctattgcctcttctactacttttacacccattgcatcttttgcacccaatccatctttcacaataagattgatgatatgtgcagcacaacgcatatgcatcaatttacccctaagcataagagaggagagaggcatcttatcttgcatttctttcataacattgtcattggtgctgcagttgtcaagagtgaccgtcgagaccttcttgtcaatatgccaatccagcagtacatcatgaaggacttcacttataacctcagctgtgtgtggatgtggtacatacaagaacctatgagtataatggcaaaaacaagagatcatattactatacaagtcacaaccaaaggtagtgcaacgaagaaagttattattaccttaaaagatagttttttagattccaactctcatcgatatagtgaacagtcacaaccatgtacccttttttctgatggtttgctgtccacatatccgtggtgacagcaatacgagatcctagttgctggaactgatgcaccatggataccttttgcacttggtacatgtccaaaatatcctttctaattgtatttcttgacataaccttaaataaaggttgcaatgcagcacaaaaccttctaaaaccaacatgctcaacaatagaaagtgggtactcatgaacacatatcatcaatgcgagttctttcctagcaacaccttgatcaaacacatacttctccaatagaacatttccatcttgtgttttagataatttcaaagtggactgttttagaccttttctagtttgccgagattcacagctatttacgtggctacgcaaatgacttgtaccatttctacatacagctgatagtgttttgtgacaccaattgcatttagctttccaagtaccacctacacagactctttcaaagtcttgccatacatcagatttaagcttccttttactaccaaccctaacatcctcatctatttcaacaacatcagtgttggtggtaccagtaccttgaccatcagtaggagtaggcgctattacatcagatggtgtaggagtaggatctcgtggcgtagatgatggagttggagctctagaatcgcgtcgaccaccaccactagcaggtccagcaccactggcactgtctcccggagttgacattacaaatagaaataaaaaaacctgaaatggattaacaagtccatgaacggagatgcatattcttcaatattctgcccgcgggagtaggatctagtggcgtccagaatggattaacaagcaaacctggagagggctggccgcctgcacggctgcactgccgacctggtcacctggcctctggcggtctgcactactagatcggttggcggctgatggcctgcactgccgacctgagggagagctgacggctgatggcctgcactgccgcctgctggtcagctggtctgccgcggtggcgcctggcggtctgccgcccgccgtgagcacgagacagggaatggtggccagccgccaacgtgagaacgaccgcgtgagaggactagaggagagtgaggattagagatgtagggttttagcctttagggatatttgatgggccgactgagaattgggccggaccagggaatgtttttgtgggctaataaattaagcgggtaatgggtaatactcgcgggcgaaattttatatccgctaattacccgcgggtgagaagtgttgtccgtatccttacccgtgggcgagattttttacccgtatccatgcccatcgggtacggaacccgcggatatccgcgcccgcgggcagaattgccatccctagtgggagcaggcacctcctcctcgtattcgtccgacaccagccccaacaccgacccgtgcagtggctgttgcacgtccatgagggtgtttcacagcatgcacacactatcgttttcgccgtcgtcagacgtcccgttcgtcttcccggccttcgccctgttcttcctccccaacatgctgcccctgcccacggtcacagccgcgagccgaccgacgctcgtcgacgcgggtacgggcgagtcggtcttgctcttgtcttttcttcgtgcgtgccgccggggaggacacgatggtgcctgccacgcttatgttatcttggcgatgacgagtccagatctgaggtattagacaaccaaggcctgtagcgcggcaacagtcggcatatgctacggagttggtggtggtgttgtgtcgcctcggcgggtccaggtctagaaggcactcgcattctctcgcccttttcaggctgacgcctggtacgggtgcctctcggtttgtagctgcgctggctaggcttctttcttcgcttgcgtgctctctccctgtatgtatctagcggtatactacctatgtcgcctccagatgtcaatgtcttcgtcgtgtccttctccggcaacaaacatgtatgactgtctcttctcttccattcctgctcttgtgggggaggcgagggatggtgatccctgatttgctgtctatgataccaattcgatagctcggcatcgtctatctacatgacctttcctttaccacgatgtcgactcggttagtcaaataaaaaaatattatgcggagagcagagacaatcaataaaaaatcttgagatctttttggtaaatagtttacgtggttattattgtgaaccgttgtaacgtctgggtaacggaccagtaaacatttgatacgatagagtaggtaagcaaacaatacgggcactttgaggacgatagcccgcagcgaccgacgcttgtcacctgcacgggtgcgctgcggagcttgctggcgttgccgtgaccgcgaataaaaagaaagcgccccgccacgtaacgtcctaccgtgcaccacgaagataagccaccagtccagcctgcgggccccacgagctccctcgcctcccgcacgtcccctcgccacgtgcacgccctccaggatcgcagtggccggctggccgcagctagtgctgggaatatgggccgggcttttcgggccagcacgagcacgggccgaaaatatgagcccaaagcatggcccgacacgaaataatatgggccgagctagcacggcccgaaggcgggcctgggccgggcctcaatttccggcccgtcggacccccggcacggcacgcatagataggccgggcttgggccggcacggctcaattaagcccaatttacttaatttagtaagatatcaaccttatattgttgttatatttagagtttacgtggtcaaataatgctagaattgtttaatatctttaatttagtaagctacgaactttatatggttgtaatattttgattttatgtggtaaaatatacgggccgggcttgggccggcacggtccaaagaaggcacgacgtagtttagggccgggccagaccactgtttttacacttcgggctgacacggcacggcccaaaaatcttttgggctttgctggcccgaacccgtttggcacgaagcacgatgagcttgggccgggctagcccggcccgacccaattccaagcactagccgcagcccgcttgggccccaccgcctggcgcgcttttacgcccgcacacgcgccctggcccgcgccgggcccaccctgcccttcgcaagccgcacgatgtgacagagcgcgcatccctgccgtccacgcgcccgcgcgacgctggccacgagttcccgtgcggcgatcggacggtgccgatggcgaggccggagcgcgggcagaacggacggcacgggatcgcgtcgcgatgagggtcacggcagaggaaatggcggccacaggttcgctgttcggcgttcgccggcgcccgggaaaaagcgcaaggcgagccactagatcgccgccaggtgggtcctgcgtgcagccacgcgcaggccattccgcgtgttcccaaccgcaaattattcattattgtcagtgacgttttatttttttcaggagggtccctgctgaagcctggatttgcctgtggctaccgtggatgtccgttttctggctgcattttactgttcacagaacagttttgattaattgggcgtgctgtttaatatctatctatttatttgttcttgagaaggaaatgctccgagagaagggaacatgaatttccgtatttgtttaccaaccagcacacctatttaaatctgaaaaatatagaaatcatttttaaaattttaagatacactatgcaacaagcatatgttactattgcatatattctaagtcacataaaaatcctgcatatattctatgatacataaaaaatatgaatcctatgtataagtatagattatatattcaagtccgtgacatgaaatggtttagatgaatgattttttgtgtttaatactctaaagtagtgatcagctattgataaacaattgaggctgacagacggtgactgtttcgccaaaaaataaaataaaataaaatctataatagtctaaatgagtgtttgatttctaatgactaatttttagtctcgctattttattctattttattacataaattaacaaataaagaaactaaaacagaactaaaacttctattttaatttctatatttggtaatttaggaattaaaataaaataaaatgaaggtattaaaaattagttcttaaaaactatacaccccttgagtttgctcctggccacaataaatacttctacacgcacttttcaaaagctgagtagcaggatgagcgtgacgagcctcatctccctagcaaaccaagaacaaaagccatccatccgttttgctccgtagagcgagagcgagacagacggttggggaagagtcaggcgagccagcagcagcagcttgctctgccgacgttacaattccgggaatgcgggagggcgtgctcgatagatttcaggggccggagctcgagtaaaccacgagaaaagatagtggctgagatttctcgcggcgctcgccgcgagagcgacccccacaggtcgccgcccctccgcggcccgcgcagcgcacagcatacagtcagcacacgcagcagctgccaccacagcgaacagcaaagcacctccgactcggagtcgcggcgagagccgagaaccttctcattcatcttcctcttctatccatcctgcctgcctgcttgcctccgtattccagctagatctccgggcagccgattgaccgagaagtttgtggttgtggcggcggcggagagggaaacggggagcgggagggcggcgcggatgccactgctgcgccggcgccggcggggccggtgatgcccgccgtggcggtcgcttgaggtgggtggaatcgggcgtcgttgtgcggtatttcgtggcgttccctgtcattaatgaggtacctgacgctcgaatgggtgcgcgggctggtgcag

SEQ ID NO: 37 - DNA, 858 bp, Zea mays
atcacacttttatatgttatcattataatgttaatttatataattaaaatgatatgaaaaatgcctatatatctaacgttcaaattaattgataggcaattatccctagactgctagtatatagtcttctagttaactaattcatgcttgatgcgtacgtgcttatgaagtatcggctatttgtcaagatcattggccataggacagtagtggtccaaaagatctagatctccgttgggagcagggtcacaacgtagggaaaggaaaggtggacaatacgtgaaacctcatcctttcacaggaaaggcgcctcatcgggatgcaaggtcgctttcacacatgcatacatgatatttgaggggatcggcagtgcatattttacaattgaagggcatgcatgatattttacaatctttaatcttttaattcgaaaataaatgacaaatatttaagaacgaagttagtattaggcagaagcttgcatcgcatctttctcgcaggtggtgggatttgctcaggaggcatgataggtacttggacggttcccaattttaggcggcggagcggaatacttttagaaatcagagaacttgaatttctccacaaagccatccatggccatcgtccatcgatcaaaatatctgcatacaccagctagctgacacagggtgggtgccagagtgcccgtgaccaaccacgccccatctgctaaacacgtagccatgcatggcgccacggccacgccagccaagatatttgttgccctcgtctcgtcttgtgcccttcttaatataaaccttgtgcccctctgctgcagcaagaaggaaagaagctagcgcttatagcttgtcagccatg

SEQ ID NO: 38 - DNA, 1876 bp, Zea mays
attttcgacggctattttcgtcggtctgccgacgaaaatagtgtattttcgtcggtttacgcttattttcgtgggtttttggcccacgaaaatttaggtgtttcttcttggtcttcgacaccctaagtcactacgagcgcccccgatcagtgcaatgggatgtggctatttatctatctcttgactcgaaatgggagcggtcatttaggggccttagctggtgatccgggctgtttccctctcgacgatgaagcttatcccccatcgtctcactggccgaccttgacccctacgaaatcaaaatactaaacagagtgggttaccggctctacgaccccattccggggcactactgtagagctctttgggccttccatctttctttctttcctgtagtggtgtgggctgcgcgtgatctttggcatgtgggcccggcttgtcggtgcggagagatgtgggtgtgggtgggctggaccggccagattcggcccatggggctatttcctcttttctgttttcttccttttattctatttaagttttacataatttaaataccaaatcaatgtatcaaattcatatttatatgcacagttcaaagactcagcatgatgcacctttatttatttaagttattttggttaaattctaatcctcacctgatggtttatattcttggtaaacaaatatgaaaaggggaggaataatcacataatcaagtaacttatagaaaacccttttgtttcatatagaatttgggtattacaccttcggggctagtttggtaactccattttcgctttggatttctatttttttaaggtaaaataaaataatttccctcgagaagatgaaaatcccttgaaaaaatgtggtttccaaattagcccttaatgttgcatttgcagccctccaccagatcaaacctcagggctcttttggaacaaaggaaaaatggaggaactttgaaggattaaattcctgtagaaaattttcctatgtggccctttggaacaaaggattgacttcctacaaatcctataaaattcctatagaatcgaccattgtagtgagattttgaagaatttttaaaatggggtccaacctctttaaaaaattcttatgatttggaagtgtcatgcaactctatttctacatttttcctatccctatgttttactaattctacaatccaaaggatgcctcagtaaataccgttcatgcgacccacctaagggcctgttcggttagctctcaatccatgtggattgagtaggattgggtgagtttaaaccccaaataaatcaaatttcttcacaattttttccaattacatccaatccataggtaacggtattaaccgaataaggcctaatcgggttattccttcatcacaccggtttcaatgttgtcaatgtcaatgagagtaaaataaattgaagaatgatatatgctcatctaaataatcaatatttattagagaaataaaaatagctttttgtcttgtatctatttttttctacttttatctgctacgttgatctctagacaccgagagtaaaagatgataaccacccagtacgagctacggcatcacaattcacaacctcagaggagcgatcagtgagcattcctggcctctcacaaacttccggcaaaggcaacgagagctacctgcgcctacccgccctgtcctcctcgagatattttgcaatgccttcacaaatatctcgttggccccgcggcacggtgccatcagccatcgcgggcgaccgcgcgccattatagcacacggggcacggcacgccttcggcctcccactaactgcacagaggacgacgcggcagcgaggaggaagcaaaggaaaggggatatg

SEQ ID NO: 39 - DNA, 1117 bp, Zea mays
agacgactctccatcttttttcagatgcaactttgctaggagatgttgtctactcttaggcatccgtccgccacaaacaactgatctaatccataccctcctgaggattagaatgagatggcacgttccatggagattggaaagcatcatcgttatgacttggtgtatttggaaaagcagaaacaactggattttcaacgagactccacccacaaccaatgggtgcaaggaaatgtttaaaaaagaaatgagtttggtgtgccaccgagttaagcctgctatgaaggataaaattagtaattggatgcagaacgttgtaccgtaatccttgtttcttttccttgtaatctgcacgtttcaaaatttttttttgaagcgaagtatcttggactcccaacaccggacggaccaatttgtgcggaacaattttcaaccattgtcagatcgaaagaaatgtctagcggctggtggtaaagatgtttttattatgtcaatagcctaagaaatctatactcttagaaaacactaattttcttgttttccactgtcgacccttttacaaaatacgagtatacaccgtgagtgtttttgagctcccgaactcccgtctgaatgggccgaagagatgcattcatgcattagaaaataatgttgatgggaaagatgtaaaaaatggttattttttctccaacaacctttcagaagttgcacggctcgtcaatagcaatcttcatggcccattaacaatgcgctaacaaatagacagagtccaattcatcgaggcccacgcaacgcgggcacacaaagattctacaatccgtggcggagccggtggggggatcccaatgtcgtaaatagctgcggagccggtggcggagcccgtagcgggcgctcgaaaatatctcggcacggctgggagctctggaaccttcgctggcggctccaacccccgacgaggcgacgaccacagcactcccctcctatttatttcagagaaagaagacgagagatatttttctcacgccctccccgcggaattataccttttttttttctctctctctcgcctcgcttccttcgaatccatccatctctcgcctccctttccaattcgatg

SEQ ID NO: 40 - DNA, 2445 bp, Zea mays
gcatcaacaccttcgagcaagccgaaggtatgattgtaatacaaatcttgttaatattcatgcatgatcctgtgaaatgcaaatacgaatgaattaatgagatatacttgttgttttcgtctctttgcattctcgcttatctataaaatgatgaaggcatgtctttcgtgatcttcgtctgatgatcattatgcccgtgaggagatgatactttggaagacgaaggtccttaatacttaataattgtgttgccttgttcttgattcacagcatttgagaacaagtgaccaacaatacccaaaaatattaccattaaagaatttatttttggaccaaagtgctcattttaattaattgggttttcaatataaaagaaattccacaaaaacaatcataaatcaaatgtgagaaaacaaaaaatattttaaaggtaaataagaccaaacacttgaaagaaaaatcaaatactatatttaccactaataatctaaatgcattatttctagttgattgttttgaggtgttagaccgggcaatggccgcccttcgccggagacgtggtcggccgcgccgccgaggccggggcttgccggcgtcatccctcccccctccccccacttggcggcgtggcggcaaccgccacggaccggttcgagggcctctaggccctcctattggaggaggaggttgaggccaccccattggggcggtggctggtgaagatgatgcgtccgcgcggggcatctacgatgtgaggggttgtccacgacaggcagcgatggtcccggcgacaaacgtctctagcagggttgggaacgatgatgaactgccgctgcagtggggggaggaggcgatggtgccaagtcaacctccatgggtgtggtcgccgacgactccgcgtctcccattggcaccgacggtgatgggagcgcgatggggaggccgcattcaaccaccggcagcggcactatcgctgtctatccgtggagcacgaaaaagtccacgttgtgcacttgaacgcggcgtgcaatgatggcgttcaccggttggatcgctgcatcttggccagcggcgtacgcctccaacagtgcatcatcgacgacatggagaacttcacgcattcgacggatgcgaacgaaaacggtttgctccatgcctctcctgtcgttttggaggctggtgcctccgttcttgtcaaaacagcgagcgttcttcttcttctctctctattctcgtgagcacgtgctaataatgtgttgtaattagtgaaaacgaggttagtgagaaagtgacaacagttagttctttattacaaaggtgttttgtttatatacatatgaaggggtgtatcacaaaggggtgtatcccttggaaaaaatatgtcgcattccttggatctttgattggtcacatatactccctccattccagaaaggttgtcgtttgactttttttagaccaaatttttaccggtttggcttattcaaaatatttgtgaaaatatagaaagttttagtttataattaaagtaaacggtatgatactaaatcataatgaaaaataataattataaatttttttgaataaaacgagtcaatcaatctttatctcagaaaagtcaaatgatattctttctggaacagagtataatattttgtaacaacgagaggagattagcgcgaggtcgcgctcctgaccccacctagccggtctgtgtctgtccttccacgtaatgacgtaaatagtaacactgtccagtccaggagcaacccaaaagcgtgggcgtggctccacctcgtccttttgccaaaaatcgcagtacaggtctaaagaaatctaaaatcgcacaatcgatggccgacgaggattataacatttcagcgactagttcgcggacacgtagccaaaagcgaagcatttgacggaggcgagttttagatattttcacccgctccgtcagtcagctgctgcttgcacgagacgtcggtacgggcggccgagatctcctggccgcctcgcccaagcgcgctcagccgttccttgcttttattttactccccggccgcggcgccgtgcggctggctctgcattctcccctccggccctcccctcgtcttctcttctcttctccccgcggagcgagcgagagaagcaaggccgctccgtgcccccaaccccgctcactgagcaaagcggaaaaagcgaggaaaatatcctgctccagcgaagcaccgcaggccgcagccgcagccgcagcagagaagagcagacgccatcgcccgcagccgccgcccccggagaatggtgcgggccggaccgcgacgggcgaaggagggcgccgcggcccccggcggcccccgccgccgctgatagtagtctacctgctgctaaccagccatctgaaggcacagtggtcgcacgcgaggggcccggattgattgggtg

SEQ ID NO: 41 - DNA, 2124 bp, Zea mays
cctaagtacatgccaatgtggcagccggagagatcttggcaccctgctggcgtgatgtcgtggctgtcggaggagcaacggagcttggcggaaggacagctgtcggagcggtcgagtccttgctgacgtccacctgcttccgtaagagagctgagagccgccgccgtcatggagattgggaggcgccattattgcctatctggcggagctggtcagatggggacaccggtcttgttctctgcggcccgagtcggttcggggtggagtggtgatggcgctccctgttgacgtggcgggcccgcgcccgaggccgggcgacgtgggggctcctccgaagctggggtcgtatctgtcttccgttgccgaggccgagtccgagcccctgggtcgggcgaggcggaagtcgttcggcagaggccagggcggagtccgagccctggggtcgggcgaggcggagttcgtcgtcttccggggccgagcccgagtccgagccctggggtcgggcggagcggagttcgccgtcttccgggtcttagcccgagtccgagccctggggtcgggcggagcggagttcgccgtcttccgggtcttagcccgagtccgagccctggggtcgggcggagcgaagttccctatggcgcccctggcgaggcctgactgcctgtcagactcactctgtcgagtggcaccgcagtcggagtggcgcaggcggcgctgtccttctgtcagaccgatcagtggagcagcggagtgacggcggtcacttcggctctgccggggggcatgcgtcaggatagaggtgtcaggccaccttcgcgttaaatgcccctgcaactcggtcggtcggtgcgacgatttagtcagggttgcttcttagcgaagccaaggcctcgggcgagccggagatgtgtccgccgttaaaaggggggcctcgggcgagacggaagtccctcgaggtcggctgcccgaggccgaggctaggctcgggtgaagcgtgatcgagtcactcgtatggactgatccctgacttaatcgtacccatcaggcctctgcagctttatgctgatggggttaccagctgagaattaggcgccttgagggtacccctaattatggtccccgacaaatatgctaagctttattagagtagtccaaacatcccaaggagctaaactttaacacttcaattcatatgactaaaacttagcaggaagctaaaatttatcccgtaaaattgaaacgggcctaaaaatgatgtgttaaagtttagcacccattaacactttagttccaaaaaatactaactatgctaaaagtggtccccaccatattttgcattgaatatccctctctcccctacaatcgatggcgtgctctagtaaagcccaagtgctaaaatttaacaccttatcaagctattggaacaaataggctaaacgctaaattttgttgttaaactttatcactattggaccaaataggctctaagtgttaattttagatatgtggaccagtgccttaatacttatatctcctaaaattctagcgcaagaacacctaaattcaaattgcctaataaaagtagaatgaaagtggtaatccgaactgttagaacaaatttaatattttaaaatagatatgtattaaatttgacgttgatctttttttatgttatcaagcacattagtataaatatgaataaaatattatataagttgttttatgtattatttgctccttacaacacaaaagttgaaaaaattatcgaatttgtttccgaatccatatcaaagtttatatatattatttgaaaaaacatagtatgaatttgaggtttaccttttatgaatcttaacaagctgaatattaaaaacaagaatacaaatttatattgtatattctatatcctatttatttacaataaaaaatttaattaccaaataaatactgtttccgaccgtttttattcctaaattataaaacactctaaaagatcctacccaaaaaccattttaagccaagacgcactcgctgatcctacccaaaaaccattttaagccaagacgcactcgcttcggttatataatagggtagacgcccaactcgaacctgagtacctgagaa

SEQ ID NO: 42 - DNA, 3000 bp, Zea mays
aaaccatgcagtcaattgggaaagatgcttcaggcaacgagctgcttcttgatgttggcctttggttatctcagaagataaatgtgaggctttgaatattctacttactacgtccccgaaaaacaaatctacttacatatcccatctatggtttacttcttctggctctgttttgcatcagatggtgtcactattaacgttacatgcatgcctatgattcactcttatctgcaatataagctcttgtttaatcaatgatgatgtattcgtgaattcaggaacatttcaagaaaaacaagatgaccattaatctgaagtacataggtcagtggttttcttcggtgtcatatttcagggccagaactgctagttacacacatctcagatgtttcttctactgcagatccaacgtacatgatacgtgccatcccaagcaatgcttctgataacgtctattgcacactgctggctcacagcgtggtccatggagccatggctggatatactggttttaccattggccaagtgaatggtcggcactgctacatcccattctatgtaagtcacacccctgccggagcagggcacggaattctttttaccgcattcatcatctcagcatctgagacctacttattctgcttgaactaatgccctccgtactaattgttttgcattcgcgtcactcacttcagaggataacagagaagcagaacagagtttcgataaccgacaggatgtgggcaaggcttctctcgtcgacgaaccagccaagcttcctttgcaacaaagtcgtcgaggaggcaaagaaggaacatgaaagagcaacgcgacttttagatggctcgccttcccatcgaaaaggttgacgtcgagaaggttgcggcttccaacttgggtcctactaccaactgaggtcgactgccgctgatatgtgcggcggatgaaccttttgcttaccacggtttcagtagctacggcgaccggtgtttctctcactccagttttttctatcaaaaaggaacacattatccctttctaataatttaatagtgttaaatactatcactatgtacagtttggctggcacatgtctgactataataacatgccattttcattgttgttcaagtatattcttttgtaattttgtgtaagaataagttcatagacccccaaagaaagttattataattttatgacagaaatctaagaaccacagtactggactagaacacaattaatttgtggcaatgtgacctattgtcaaatgcagttcgatactgcgatgaatgcgtgacgaaacatgggactttggatggccggtgatgcacggagaggtccctgaagtaatcgacgctccagtcggctgggcgttgcctactgcctagtgcggcagcaggcacccagattaaggcctcgaataaagggagagctggagagggggccccaatggaaacgcaaaaaaaatctttacgctcggatgcaaaattgcaaagtatctcttttacggccctcacattcaatatatatctggtggtccatataaatagaaaaaaacaaattactaaagggttaaattacaaattttgatatatttttataaggctccaagtgatgcatgtcagagcatgtcagagggtgtttacatccagaatatacagattttttttccatgatactgagcgaacgtttagcccggctcatacaacagagcacgctgggttgcgcgcgtggcgtggcccgtgacgactcaaaaaggcccatgtggaaacagaaagttccgtcagcggtgaccggtgagcagtcgcgttttagcgggacgtttgtcccacctcggaagcggaagacggggaggcagggggaggcgggcataagaaacggcggtgggctacctgctgaagacatctttgcgcttggggcaatgacgcagcttatgaggtcataccgaggcgcgtcaattgctggttgaaaactatttccaaaccccctctttggcccactgggccactgagaatttctggaagggctccttttcctcggagaaggtaaagccctacaaagcaaattaaaattattgcagacaatgtattttacaatgctatttctcttgagtaagtaagtaaaatttctttgtagtgacccttaagatccttctcaacgtcattttttggttttcttctttcggtcccgttctattagtgtttccttattattaccagtaccaaatatcatcgattaggtagggtatttcatttgtttaattgttatgaatacgtttacttatttatcattaatttagtttggtgatagactgttatagatttttaattctacatgcttatttctgactctgctgaaatttctgcgttttaaagaggatctaaaagtatttatcaccttctcacaaaaactagttcaatatgtccttccttaccatctcactcgacattaaaattacagacacacttaccatctcgtctgatcattccatcatcagttctgcactttcgcttgtttagctgactctttcgtctcttgcgccgaggtcttcctccttggttctagcaaagtcagaagccagaacccaccaaaccacatggctgcacacttaacaccatgctaccaaatggacatccactgcacagcatgcttcaattttctacctgatactctccaatccagaaataatcatgcaggccgtcacagaccaggtcgcttaaatctcgcgctgagactcgctaccaaccaaccgcaagcctccaatccagaaacaattgcagattttattagatgacatggacactggtgcctggtggtggtggtgtacaatttattaatagcctataaataaataaataattagcatgtgcagctactgataaaagagtcccgtggctcgcaagcagcaatcttgagtcctggcctgggtcttcgctgccagcacgcttgtggccaagaaacgttgggggcagtttggacctcggagcagcagcatcc

SEQ ID NO: 43 - DNA, 3000 bp, Zea mays
ctgtacttttatttaatcacagatttagtcctaatttcataatacacacttcaaaacttgtttatttcatatctttttcatatgaactccaaatttagtggatgaatacaaatgttcacaaaattattctttgttcaaataaatatgaccaactgtaatttgtatactttaagttttacacttggaatatggaattaaagtatatattgatttatttatttaatgaaataagtaaaaggagaatcctaggagttaaacgatatttaatctgatgagattagtgatatgcattacatgaattcatttttggtttaatctttaggtcttaatgagacaaatataattatgtatgtaattatgaataacacttaaaagatgatcaaattcctaaatgagggtagttcatcttataacttaatctttttctttgtttaattgttacttaaccttttgagttatgttccacacacttagagagtaatcaattcccaattaagattagtctattttataacttgatctcattccactgtatttgatactatacctctttttgagttgtgttccaatatttgtacatgtttgatgtgatgttcatttttacctttcaaatgtattgaatgtatgctcgctttacttatacaacgagcagctcgtggttcctaagtgtgttgccgaagatccctctgagcaacaacctggtgaaggcaagtgtcctctgacctatcatgtcctactttactttataattcactgtcccacattacattattagaacttaaggattgactagtctgtatttcccttacccttgtttacctttttgggttaatcatggttagtttacgctattgctttaacttaatcaatgaacatgatgcgatcttttatgatacaatgatgttatcccgatgaggtccttgtgactactttaggggggctcaggctgtatccgaaacctttccgtaaggacctgtttgggtagtgacaacccgggataacattgcaaccatgagggtggaatgggacgcccttagctgattaattagaggaaccagaggagtagttggcttcgccgtatggccatcaatggggtccaggcacagtacttgctctgccgaggctggttgtagaggtttttttatttggttttgttagtcacccttcctctagggagatgtactgtgtttatcaaactggagaaacctaacgggcggctacgacctctaggaaatctttataaaggctacgtagtgaggctctgctaggtcaccttggtagtgatcaatggggaggctagaaccccgggcagacagggaatcacgacttgtgggtaaagtgtgtgacctctgcagagtgttagaaactggtatatcagtcctgctcatggttaagagcagccttggggatcctcttcgattagaagaactttggttacttttatgatgatggttaacagtgatggttataattttcaactctggcatttccctcttggagggagtgcctctgggtaataactgggtttattactaaaacttggctctacttatagtaataaaacttgactaactaaaagcaactgcttaaccttaactccacatacagctagtccactttagtcaaacgggacatttgttgagtacgttgaagtgtactcacccttgctttacaaaccgccccaccccaggttgtccccactgttctcagtgctcagaagatgaagctagtaacatggagggctttgaggagttccaagactacgacgagttctagtttactttagtggcaaaccccccccccccagtcagctgcctgtgtaggcttatcattctacgtttcgttactccgcactttgatattgatgttaaacactatggttatgtaatagactctgtggatgtctcagacatcttgattaattaaagtacctttccgctatttaattgagcattgtgtgatgatgttcaattatgtaatcgttgtgtacgtgagttctgatcctggcacgtacatggttcgcattcgatttaccttccaaaaccgggtgtgacaccatggcgcgcccatccgccggccccctctgcggcagcggatatgcgtgcccctcccctccggctccagaggcgcggccgcgaccccctcccttccccggtggctcaaatctgcctcagtctgaccctgtcacggccttccccgccgacgttccgctcgtcggcaatcagcctccctacccggcctgcagtcgtcgcggcctcgcgggtgctcctttccccaacggccgtcgacccttccacggcatggttaccctgcaccggcatctccgcccgtgcaaccccttgtcttcgcactagccacctcctaactgcccgcgctgacacctagctgcgccaactcttctagctttttccagtgtggcgtcaaacccctgttgacacatggcagagcatcgggccacgagtgatgtggaccggcatcggtgggtccatgcatctattaagtacaacattttacaatataaataatagaaaaatatgagtctaaaattatataacagatgaatgcaaatgaaatttcagttttttttcggccatcaccggaattcttgaagtttctgcgaaatattaacaaaattttgaatcctgcatacaagggctcaagttgtaaccagcgaacagattcgaggctcaagtgtggacgacttgcagttgcagctacgactacgagggccaatggacgaaatcctgcggctgcgaggcgaacctcagattttttagatagggatgaagccaatcacaacctagtgtcccgccacgtggctggctgatcaccgcacaaagcatccaagggagtggacgcagaggcagaggcgcaggatacgcgggggaaaaaaaaggaggctcactgtacaccgagctcacgcagggcgtagcaaatcaggtaggcgaaatcggagcagaggccagggacgcgccagcgcgagcgataaggcacactgac

SEQ ID NO: 44 - DNA, 3000 bp, Zea mays
ttctagggagtatgaactggaattagctaatttggctttagtctgacaggggcacaaagaatcagttaatgactatatccggagattataggacactaaaaaccgatgcttccaaattcatgtcgcatacaaatagctggcagggctggcttttaatgggttgtggttgtacttaaaataaaaattagatagcacccaattcttttcaataacatagagcgggatttagcctatgaaagacaaagtaaagaggcatcaaaatcggctagccataatgtgcatctagtggagcgcgatagtttggatgatgaatccacagatgtatataccactgaacttgtttggccaatgaaggccaaacctttgtcattttcttctttacatctggttcaaaagaaccggcaagaagaagttaaatttagttttaatgtcgccaagtgtgacaaaaaatttgatgagctattaaaaagtggcaacattaaagtagcttatactattcctcctctagatgatctaaagagacatgcttattgcaagtggcataattctttttcccatgacaccaatgattgtaatgtttcccgtcgacagatacaatcggccataaatgagggtcgattgagttttcaggagatgcaaattgataaacaaccattttctgttaacataacacagcttacggacaaaaaattcttagttcggccgaaagtggccgataaaggcaaaggaaaagaccttatcattgttgatcctcgcacgccaaatatatcatagggagtagttactcggagggctccggccaagaggattaataagactagagacgttggggggcaagtacaattagacaagcgatcaaagctcattgtcccgcacatcgtggatggtgcgacatttttgcttggatactcctgagcctacggcggacagtccggctgacccagccagacggtccggtaacgaaggccacaacatccacacacctacaagcttcgacaactagaaaaggtatgtgggggtaaagcacttataaagcacttagtcggctggtcaaatccgtccctacttttgatcaattactcttcaaatatgctaacaagaggtcattccacgtggtcagcaacgaagaaaccccgatcattcgcaaaaagcaacacagctgactaaagcggcccaaaaggcgacgcaacaagtgtcgcctattcatccatatccagtggtgtcaagatactttccaccagcctactcatcgccaatgtattgtcttgttcaaatatggaatagcacgacgacaaacccatattacatgcatagtccctttgcttattcgggcttgggggaccacaattttataccttttgactcgttaatcaaatggtcatggctgaaaaagatacaatcctaaacgaactttatgcattagaattctattaaataactatagtgatagttgaaagatccatgacttacatcagtctgagttcttatttcgggaacaagatgacttatgaaatttactgtttcttggaagatgttgctagtccaggtgcttttgatttgacaagctccaccaaaagacagggcatatgttgagcaatgtttatgataggtggacgatccgaccctagccctaaacagtctgcggacggtccatcgtggcggcgtggacggttcgcgcgtgaacataatcagttagagttcccgatttcttgcgggttttgttagcaaacttcgcgagatttgtttgggaaccgacttgtaatgggtctagacccccttatataaatgaaggggtacgaccgatttacactgccataatcgatcaaatcaaaccaatttaccatatttatcttatttgtctttttccctatgcattaggagtaggagtaatctagtcctggtattagtcttactcgacctatttctttacctctctttggctcaacgttgtctagagacgtcttgaatgacatgtcgatcctaagacaactctaagatctcctccccgacggggtcctttccgagagacgagattcaagtttctgcgaagaagaagactgcgtcatcacgggctattcgaaagcacgtagagaagaagcagctacagattatctgtccctacatcacgaactgtcgactcccgcaaagagcaccgctacggttccatccaattatttaaccctaactcggagccaacaattaccaaacatgcacaaaatatatggattggctatgtaggttggtagccgacaaaaaaagtcatgaaagaatgcagattgattcagagccacaaccccaaaatcccgctccctttccattctgtggctgacatctctcgagggcccacctacgcctaaatccaaaaccgaacctaactcccaccagctcatcaactccaggtgaccaggtacgagtcacagattcctgggcccaggcatccctaccccgcatgtcggtgatgataatgttggtatccgctgtagccgaagaagacgtagagcatcaaatagtgttgggccagtctcgagtagagagttgcgtgagtacggtccatagtcgtaccaaaacagttcacttggcggcttgtcgcttgctgtggttcagccgttcaggagtcgttctgggtgcatagactgcgcctaggaaatgttggcaagtacgatgcctctagagcacgggtccaccacatactaggcaccaccgcaccgcaccagtgcaccaccacatccaaatcatatacctcttccgccgtgtcgtcgcccttcgctagtcgcttcgctgccacatctctcctcgtccaaagactccaagctcctgtgcggcctgtgttctgctgccgcctctggtccacatctccccgccgccgccccgtcgtctgccgacacctttagcgctgggaaggatcacaggggatcggcgcgaggcgggggacctgcggtttttgtcgcccggatggcggcggagcgatgacactggcgtcgggagcggcgcggcgttggg

SEQ ID NO: 45 - DNA, 2799 bp, Zea mays
ggacagtccggtgcgccagaccagagatgccttcggttgtcccttgctcctttgtttgaacccaatacttggtctttttattggctaagtgtgaacctttggcacctgtataacttatacactagagcaaactagttagtccaaatatttgtgttgggcaattcaaccaccaaaattaattagggactaggtgtaagcctaattccctttcaacgactacgatatcaaggactgtggcgtcatctcggcgctggaggtgacgcagaggaggaccgacaacaatgactagttcgtcatccccttccaccgtcggggtagcttttgtgccggtctgcatttaattctcttcgcaaatacacacacttgccttttttttaagcaagcgcgtatggtggtgcgtgcctgaagaccgacgatatacgagggaacttctttcggcagatgtgggacgtgctctccaacgacgagaccatgcaaaccgtggcatatatcgaagtctgtatggtactgatggttgcaatgttgtggtaaaacaactagattaaaataataaaatttatgtattggcaggatcacaaacgtattatgaaactttttctcataacagtataacacacattttgtatataaattatcgtggtgttatatgtttccgttgcaacgtacggacactcacctaactattacatatgatacaaatattaaatcatgtccatctagttcttacctaacgtatgcattttttaagaaaaaacatcattcaccactatcatccactacttctattatgcttagagggtgtgttttatataaactatactagctaagtgttcgtaagtttgttacgatttctatttatacttaagtataaaatataaaatataaagacatgtgtgttttgttgtgttaattagtgtgagtacatagtcaacaaccatcgtttgaatcaccatttatatataattttaggatttttagtacttaaatgtgagtgagtacagtggaaactgtgaaataaaatatactgatactttaatatagtagagatagagatatcatataagtacaccttgcttaaataagatatttattttaacaacattatttttatttttaatatatgtacatatttcatttttatgacatgcggtgcattggaagaagtagggctgggcattcggtttttttaaaaacttcggtttggtttctcggttttaaagaactccggttttctagacattggaaaacgttcggttttttaaaaaaatgaaaaaccgaaaagttcggtttcggttttttactcggtttttcggtaaaaccgaatagcatacttattcttaagacaacacatccaacaagtttacatgatagattacacataattttaaaaagtgaaaattatataggtacaaaaatttagagatacatcatacatcacatataaataagtgaataacaatttaattgcttcacacatttagttcacataatcgaatagtcaaattttagaattgataaagtttggtatttcggttcggtatacggtaaaaaacgactacgataccgaaaaccgaacttctgagatacaaaaatcgaaactaaactgaactaccgaaaaaaccaaaatttcggttcaattcgatacggtttggttcggtttttagtttataataaaaaagtgcccgccttttggaagaagcgctttatctccttcgcgaggaggcagattagatccttgccaactcttattttttttgcgtgtgtgatgctacgaagggtgcaacctgtgtacacgaagaaaactcatacttaaatataatatatatatatatcatgtatttcttatttataatatgtgctggtacgaagagtgcaccctctatacacggaaaactcacatttaaatatagtgtgtatatatcatatatttatgacatgtattttattaacctaagcagtaatagacgtctcacttcccactatatgaatttatcgtctgttctattgattggatgctatacaaatgcatttaattctgtatttattaatagactatatttataaacactctattgtataataaagtctcttagttgtcttatgtgtttagataactattttggtgtctttccactgtacatgcccttaaagaaagcgagatttctattttttcgtgcttcgcacggaagggattatgagacagaggatatagatagaaaaaatatgaaatgcgtggatggaagcgaaatagaggcgctgggccgctggcacggagaaacaacgcagcgtaaggcgcgccagccgtggacgtgtacgtgtacccgtgtcgtgtctaaacggacttcctcatctccgcgtctatttaaggcccactcctcgcatcgcctttaactcccatcccagatcaggattagccgaccacccgccgaaggccagagagaaatatctcatcttctctccaccggatcggttcaatcgagagcgagggagaaagggaggtggtgcgtcgaggggggccgagattttgccggtttggagccagataggggtatgagctgcttcgcgcaccgccgccgctccgacgtcgcccgccgccaggacggcctcctcgtcttcgtcttcttcctctcgattcccatacgtaccagtagttttaatttaagtagtagtaattgtagtagcaatctcttgtaaactgcgctcgcctttgcgtgttcgtggtccttttgcgctttctcgtccctctttctctcaatctctccttattcttctccttccacggcgaagccggcggctggt

SEQ ID NO: 46 - DNA, 3717 bp, Zea mays
cgccactcctagcgctcgtacggtgctgctctatccactgtgcacgaggacggcagccgatgccgcgcccgcctggttggaccacgtggaggacgtgtagtgtgttcccagggatagggttagatatagagtaaatatgagtgcggagaattgtggtatagagtaaagaatctcgctgaccaggatagaatattctttttagagtaaaaatttagggttgtatgagtgtggatagccttaatgtccctcctacactgcaacactacacgatacgaccttcgcttcacgcctgctgcatgcgcgggcacgccacaggtggggttgcggtagccgacatcattccttcggtttttgtgaacaccatgatttgttagtagagaaaaaatagtattgaatgatgaatatgtttggaaaagaatattatggttggggtgggatatagagaggcttgttcgtttcccttttaatccatatgaattgaatagtattgggtcgatttaaatttatagcaagtcacatttcatcccaatacattctaatcagcatggaattagaataaccgaataaagccttagggggaattgttacgtgaagaagaaaagtatgggtggaatttggatgacgtggcggatgcgtcttctctcctcctgtttctatcctcccgttatagatggctaaacgggtcgcccgacacgacactggtactaccactattaggcacgacattgttaggcactattagtaatcgtgtcgtgtcgatactagtgcctagtcattgtcccagacactatactatagtgcctaattatgctgtgtcgacgttatacgacactaacacctaataatgcacgagtcagcccaagcactattttattttgagagcccaaaaaaacatagaagatctttaagattttatgtacaattttagaacttgaacatgtatatcattataaagtgaattattgtgtttaaaaccataataaatcacaatacacaatcgcaagtatatatcacaatcacatctacagactaccagtggtttaagccatgcctaattatgccgaccacttaatcgtgccagctcatcgtattgaatggaggaccaagtacgatactagatccatattatatcagcactgacaatatatgaattgtgactgcgccggcctatttagcacgacccacttaactctctatacataccatgcccacttctccacccgtggtgctagatactggatcatccctcctttctctctccacacacgttcaccagccattctggccacgacacttttttttccaaaaacaaatctggcggcaagttagcaccaaacaacatgtcaagatgtcattcccgccacaatttctccaatcacaacaataaatttttattcactagcggcggcaggcgcacatgatacaacaacaataaaataattttctatttagatcccatattcaatactgctatgacgagtggagacgtgattgatcctgtaagtttcattgctcctgatggcgggtcacatagctggcagggcgtatcaacttttgaagataacctagaatcaacaagagaattggaaaaggtaagattctcaaccaaataatgtcttttttttaacaaaagtagtgattctatctgtcagattctattataatacaacatgcttatgttcatcctaacttgaaatcacttgttttcgtgaataatataggatctcatgaagaaattggtgcatctcaaatgaacaacggcccagaagacatgttgccaaagggtggaatgcgattttactctgagcaagatgcatacgccttttacaaagcttatgctggaaagattggtattagcattcgaaggaatgtccgtcattatacggggacttcttccacaataaagaccagaatgttctgttgcttccggtgaaggtataaaatgtccactactcttactacaatgactcatcttattaccacctaattaaaatgtttcacactacaaaagatcagactcaacagacaagaacaaagacttttagcagatctgagacacgatgcatgtgtcaagcatctatgaagataaaaaccttttttttttgttgcagtagactacacgaacaaatgtaagacttataactgttagcaatgtcaacagagctaaagctatggatacctctaaaactgagatctcgatgacaaccaaaaaaatataatttcagttaaaggattaaggaaaaaaatcaacaacaaaaagagttatggctaccttcaaaatccagatttacccacgccagactccacggctccagaggcgcgaaggacggaggtcgcagatggcgttgcagcgacgtatttgacggtgagcggcgacagagcgaggtgtttgacggcttctctcactccggctggttgtggagcactggagcagcagggcagcagctcgagcaagcaggaaaactgcggagtgcggagcatgagagttgaaaggataaagctttcggaccgctcattttctcccactttttttaacttgtggagatgtggctaccgtttcgtggaagtctcgtttcctccttccagcgccacgtgtgcaggagtacgcacgggaggagagaagtcgcgtccggaggcaagagccttccgcgccgaacgcggctcgccgctcttcctcctcctccccctctcccgtaggcgtcctcgccgtcctagcgtctgcctttcgacgctgctgccgtggagcgcagatcaaccctgactctgcccgatttcttctctcgttggtaagggaactcggctagaaatgctcgttcattctacagattctccttttcttttcttttcttttttgtcgccatgcttcaattccaatgccttcttttctctctgaccccgcggatttgtttgatgcccacatttctagatttttaggtttctagtcacttcgatcgcgcgccttattattgattagttagaaccatcataattcctaactcataaggtgatccggcatatttgttccgccaaaagaatcatttcccgcacaaaatatgatagccaagcttgccgcacagagaaatgtgtggccacctcctgatgcatcggtaatacattaatgtgagaaatcggttgcaatgtgactctttggggatcaggttatttggaaacgagggcataaaaatagtacaatacactttagatggcttccccatggtgttttctttgagtgtgcacagagttttgcttcggttgacgtagtattctttgatgctgctaatgccaatattttttttaaaaaataattcttttcaatgggtactgatggtactttaaaaaaataataaaaaggatcagacattagttgggagcagtactttttaagttcactcacttgatcacggtttgaatgggttcagttcaaatcagaaaatttggcacgtaaaccccaagtgtgcaaataaatatacaatcaatgaagattgagttgggaacaggaatgtgattgctttactgttcaaaggaactgtaatcactgttttggtgcaaagcagtaatcacataaatagtgtgactatttattagtttgcttgtgcaaaatgtgcaaaatctgagatttatcaccataaaataatttgtttcttgttgtgctctacaaatcttttcagatgctgaaggtcatttcttacatgttgcagagtgtggaaaaaccttgca

SEQ ID NO: 47 - DNA, 2559 bp, Zea mays
cccgaacaaacaaatagccccattactccatgttattatagcaaacaaactggtacaaaatctaaaagctgcacacacgtccatacaatgttcatgacagattaacttacttagaaatacctgaaacaagtacccaataagcaatgaagcaaaaaacaaaatttgtgacaagtctgcaaattggaacaaacaaactgcaagtctgcaatagaattatagagaagtagacaacaacaggccatggccaagccaccgccaaacagcaaacaggtagggctggccgactaggcaccttgccaacctcattcagttacacaacttggtcgcttggagtaaactacaaactgcaacttgtgaacagacacaacactagtctaagagcactgcacagaggcacacagcaagcaaactgcaccatccatcgacatcaccttgtagcacaacaccaggaagctggaggcttggagcagttgaggggatggggcctgacgggtggtagctgggcggcaagcgagagctggaggcttggagcagttgagctgagcgcacgccggagccggaagctgcagtcggcggtgggtggtggcgttcctgcggcttggggcggcgggctgcggcttgggggcggcgggcggctgacttcgactagggttgtggacttgtggttagctcatcgtgagggcctgagggacagggacactgggtcgtgggccgcggctatcggccatttggcttgcgcgcctggcgtggtttcgctgtatttcggttttttgggtctattcgggttaggcaggatacaaaccgaaccctaacccgataaccgaatagataggattttgtggaccgaacccgaaaccgaaaaaccgaaaaccgaccatttcggtctattcgggttcgggttcggttcgggttcggttaacgggttcaaaatgcccagccctactagcagcagccagcagttcaccagcccccttcaccctccgggtccgggatcacgcgcaaattcccacatgtgcggcgcgtggacgggcgcgggacaacgtgccaacgtccaggtccggaggtcccatccggccatccgaactccatcgtaccgtctcccaccgtccgtccgataccccaggaaagcgctggagccccgacaaaacccaggttggattctggtgccactgccattgcacctcgcgcagccctccgcgatattttctcatcgcctgcgtcgcgtcagtgtcaccagctttgctgcttttgggcgaggggcccaggttgccgtggtgctctagtggggcgtgcgatgcacgacagcacgagctcgtcccacggtgtgtttagtttagctgccaatcgcacggttattggtgatttttctgcctttggattctctagcctttttctttgggaaattggaacccctagtcttctttagaaaatatagttggcaaggatacggtctcatgattttacagttattgacagtttgtatctggttcgaacgatgtaattctttatttcttaaacttaggatgtttttggcatagccattaacaacgacaccaactaagtaaaatagtaataccagagtgaatatcgattacatcttatttcatacaatattcaaatgaaaaatacaaaagagcagtttttatggccataccatttttttatactccaacagactatgttgtaccacaaacaaaaatattgggaaaaaataaatcttaataatcctaaatttgtaattgcataaaagttttcaggttgctttacaacatgactacgatcttagcagacttctcacacactgttaacattgaaaccgcttatggttgaagtttcataaaacaattatttgtatttaacaggatgttatatgaaagttttaaataatatagcaacaattttgaaatcggagaaaagttaagggggtgtttggtttctagggactaatgtttagtcccttcattttattcctttttagtgtataaatcgctaaatatagaaactaaaataaagttttagtttctatattttgtaattttggaactaaaatggaataaaatctagggactaaacattagtccctagaaaccaaacaccccttaagtctattaaaggataaaattctcctatatgattaacgactctctatataccgtaaaataaaatacatataaaactctggaatacggttttttattaacggttaatattgtatctctattttattttactctacaactcaagattacattttttattaaaggtaaacattgtatctctattaaaacctaaacagttttgaaaaaacaatcatcaagctctctgttacccggcccaccagtcaccacaccacacccaaacacaagtagggcggttcacgagcagcgtggggagacaggacgcccatccggttccttaattaaaagcgccccaacgctttcccttctttcctcgctgctattcccacacctcgtgcggcggtggcccaaccaaaggtcagccggggcgcttgaggcggtgagtcctcgtcctcgtccgatatcgcagcggaacaaggtc

SEQ ID NO: 48 - DNA, 3000 bp, Zea mays
cataaacatcgagcaattgaggaaagatgcagaagcacacaaggacaacttggctgctctgatgtttttaatcatgttgaaagcagtggtgggagataaatgaatgtggtgcctagtttacttactgagcaagatgcttttcatgttccaatgcaaattcttaacacacgcatgatttagcgtggggattctctagtggcccaagttcaggtggtatgctctagtatgaattctccgctggctaattgggaagatgcagatgccttgagactcccgtttccgcaagcaccggcttggggacaagccacatttgaagaagaggggaatgttagcagaccattgccggagtgtgatcaagctgatgaaataaaggagaagttgcagtcttgagtaaagacagacaaaggaagagcgcgaagagagcgacacagcaatgttcggttatctgaaccggagtgggctggcgtgagttgtgggccattgggaaaaatagagtatgctggtatggtccattcactgggtagaatatatacccaggcgcagatatgggaggaaatcatcgaagaatagaaatataaacaatacagcttcccccttgttcacgtcttcttccacctcaagccttctcctcctttctacatctgatctctgcccctcgaatcccagtagtattccagtagttaacacttctcccaaagattgaagtgactaaaatcttcttcttgttcattgttgaataagaaagagattttaggctctccaatcccatctatttttgtagctccaaactagcggtgactaaattccttcctattcaaattaaataggatgggatttaacccctccatccatccctaaccgaacaattcctaaaccgtccaatttaatcagaatgggcagtaagagcaagagtgtgtctccactgttcactcggcgtctttgtttttttggttgcaagccagttcatgcacatgcacttattctttttggaatacctaggtcatctctagactattatcagtcgcatttgctccagtttgtttcccattctgtcagtctcactaggcttgaagacaaccaccaagcagtagaaaaatgtgtctgtggacaaacatcgttagcaactttggccctgcagcttgcctgattgtgaaacctgcccataatttatgatagctggcccccaatcatattttgtgttcatatatagatctggtcaaaataaaccgaaatcagagaaccgaaccaaattaacccgaacataatttcggttccatgtttcagagaactaaaataacccaagtaatttcggttccatgtttcagagaactaaaataacccaagtaatttcggctctagacctgagaaaacctaatgaaccgaaaaaacccaaatgtaatagaattccaatagaccaatagaactttaggcttggtccaatacactagtagaaaagagctcaaagcatgcggtggagtttaatttttataggcggttttagttatcaagcgacattgctatttctacaggcggtttcttaagaaaaccgtcacaagaaatccatgatttgtagtggcggttttcttaaggaccccactagaaattatttttatcctagattttttctactagccactagcactgacggttctaaaaaacgacagtataaatgtgtttagaaccgcgactttttatactagtgatatatccttcccaaatcttaagtatataaacacacagcccctccagaacaacaatcatccattcagtcatctacacatttttttgctaaaattatgttatttccctttttttttgctaaacttcggtctattcgcttagaaccgaaacacaccctaagaaccgaatacctagacctgttcatttgtatgattcttttcagccaagcgtgagagttacatcacgggtctctagctcgtaaccctagccactataaatggtactctctccattcataaatatatgataatgttgactttttaaaaaactttgaccactcatcttattcaaaaaataatgacttatcaacttttttgtgatttattttatcacttaaggttggcaaactaaggctacggccaacacatgcaaaacattgttttataatgtatattatattgtttataaaatgctgtttgaaatttgagattagtatgagtaagctgttagagatagactaatggaaaatggtgtgtatatatgcttggtgatttgctggtgtgtaggtaggaccgcctacgttatgagctttgaggtgggagcggtgctggaggacgcggcgtggcaggccccggagtactgcttcaccaacaacggtgggcttgggctggccgacgagaccaccaccaccatcgctggcggcagcagcttcgtccccaggagcgtgctgtgaggtccccacgagcggcagcagcttcagtatttggagaaatacgatcgatatgtgcacagcgtacgcgcagtaatgtatgtaatcttttgcctgtctgttgtttatctctgagcgaaacgtgtggcttttgtggtgtccacgagctctgcggactgcgtgacactattgaggaagagacggaaacaaaagcaaaaaaagaaagacatcggcatgcacaaatagcatgacgagacgactgtacgaaaaccacaaaacttgcacgtctttcatctaccatcggagcagctagctttcgttgcttccagcacaacacacacgtgtgccaggccgcccagggaaacgctcgaggaggtagtatctgtgtgggctttgatttcatccgtgcatcgctcgagaccagaaggcctgtcaactatcccgatcacttcttgggcctccgttctcaaacgcccagtacgcagcccatcaaccactggccaccgtcaccggaaacgaacggcgctcgaaaaaatatcggggccgacgcatccgctgtctgactctgagaccgagagcctccagaaacccacgcgacgcgaccgaccacc

SEQ ID NO: 49 - DNA, 3000 bp, Zea mays
gtcaaacctttttcctaaatgattttagtggttgaattgcccaacacaaataattgtactaactagtttgctctagattataagttctacaagtgccaaaggttcaacacaaaccaataaaaagtccaagaaagggtttaaaagaaatgagcaaaagacaaccgaaggttgccctggtctggcgcaccggacagtccggtgtgccaccggacaatgtccggtgcaccagggagatccactccgaactcctcagcttcgggtttgtggaaaatgctctccgctataattcaccggactgtccggtgtagcaccggactgtccggtgtgccaagcggaccaacggtcgccagagcaacggtcgagttcaacggtcggctgacaacgctacagtgcgtggactgcgtgcgcagagtcagagcaggcgccagaaggcgcaccggactatccggtggccccacttgtcagagctccaacggtcgaacctgagagcacctagagggggggggggtgaatgggtgatcctgtaaaaacttgaaacttaatccacaaaacttgattaggagttagcacaattaagccaagtgactagagaggagagattgcacaacacgataaccacaaagagatcaacatagagatggcacagtggtttatcccgtggttcggccaagtacaacacttgcctactccacgttgtggcgtcccaatggacgagggttgcaatcaaccccttttaagcggtccaaagacccacttgaataccacggtgttttgctttcactttactatatcccacttgcgaggaatctccacaacttggagcctctcgcccttacactttgatgttcacaaagaagcacagaacaaataggcactggaacaccccttggtaaaggcagcgtgtcaaaggcggtatcggtcaacgaaccttcctaaaattcaataagtacagttataagaatcactacgattagatgtgatattctatacaatgcttatctttgtttgttagatttatcgcgcctaggcatcctactatccgataatatggagattagaaattagtcaaagacatacatctccaataatcatagacggtctctaataaacgaaataaagagaaaatcagggagattaccttgccaccaaagaccaatagatcaaataaaataagtgagacaaaaacaagggagattacctcgtcaccaataagggatgtttgtcgtagtgaagatgagaaaaccaagatggaggggatagaaccgatgtcgtatcatataggtatacagaggttggcgccaagatctatggcgccaaggtcggcgtcatagatcttggcgtctacccctaccatgtgggcgccacaccgccgccacatcgtcggtcgtggtcgagacctaggcgccaatgctattggcgtcggcccatgtaagctaggcaccaataggtatagcgccgacctatgagtccatttttgaaatgaaactgaaatacacatagctatgaaaataaaacagaaaaagatctaaattgcaaaaagttggatactctagtcgtgtaccgcattgctcccaccatgaccctcggcgccccaagtctccggcgacacgaggccatggcgggcttcgtcggccacatcattgtcgtgctggccctgtccagtgacagatccaaaggggagggggggggctccagccccccttatagccataaaactctatgggagatggaggtgaagtgtagatgaaaataaaagagaaatgagaagagagaaaaacgagtctctatcaactccctttatccataaaacttcattggagaaagaggtggaggttagaagaaaatggagaacaaagaagcttgtgttttctctgccactcgtccctttaactcatttctggatccgtctctacccagtacatcctcatcgtctgcttcgcccaacagtgacgcggtgggcggcatggcgctggcattggcgcgggcgatctacaaaatgtggatggcgcagtatggcaaggcggcgtcgaacacactcgacgagtacgaccgccggttcaacgcgttctgggacaaccttcgggagcaaccgcttcgccgacctcaccaacactgagttctgtgtcgcatacctcgctgccggcgcgcgcagcaacaccgcctcccccattggggatcgggtgaggtgcacacgtccgccacgaccacgacgtccggactccggaatgtgtgtctcttggccacctgatgccccgcacatcacccagtccgtgatgctaggacccacaactgcgccaagggcccaaggctaggggcatcccggacaccgtttccgatattagtttaggcattacttagaatcttttttttgtgcacaacaaaacaattgtatgtcagctctagacctgatcatgggcagccgacccgacccgccaaaaaaactcggcccgatccaaccaatgcaatggacgggtacgtgccatattttttgacccgtaataattcacgggccggatatggaccgtgatttttgacccaaaacttgattcaacccaaagctaaaaaatctgatccaatcaaaaaaaaactcaacccgacacgtcaaacaggaaagcacggcaccgactcgacactagcacttgttagatacagattgtgataaaacggcccaccttgatccgagccgaactcatactagtcagtccgttgtggcccgtggcgagatattttggtgcgcatcggcatcgcaaggtatgcgcggccagactggaaacggagatgaccgtgaagcagtcgtacttgtacactccttgtctccttcgctttggcacactggacacgtccaccacgtgaacacgtcaacagaagtgacccatcaaggggcccacaggtccacgagcccgagtgacgactgacgacagatcgcttgtgcgtcgctaacccgccgctagtcggctagtgggtgggaaatccgcagattcccgtcgctacttcggccac

SEQ ID NO: 50 - DNA, 3000 bp, Zea mays
catgcacctagtcatgattgatgcatgaaaggacgttcaatgatttttttcatacggaagatgacaacgcgctcctttccttgtttcttaaatcaaaattatagattaagtttggtgtcacaaactttttttcgatcaaatcctaaatctgagcatctccaagagattagtcaaatggctcagcaagccaaattttggctactcaatagcaaaataactctccaatagactagtcatccaacttgccaagctatccgcctcttcaaattggctccctctctagccaaatttggctagccgctgactagccaaactaaatagagagtctgttggagtgagatgctacatatagaatgtaatctttatgaagagttaaatagagtgtcatatagagagtcgaaaatggagtgtctcttggagatgctctaaccttattaaacaatggagagaaagagagggggaacaaatgtcgcatggcccccttgtcaaggagctcgacatcggacgccaaagtccggcatgatgtatccatgctggctccaagccatatagctagccacagacccacactgagttatggcatcgcgacatgttatctcagcgatttaacccataacgccaacgccaagtctagaatataaaatatatgcatacctatgtaattgaagaacctacaatcatagttggctcaatgaagtcgaaccgtttagacacacaacattgtcttaaagtcgtagtcacttagtagctaatgccattctgccactctaaatgtgttggacctctagaaagacatggttgtgcagtagaagtatgatggcttgaggtggaggctttgtcacgaaccttggcacaaagatccctgacaccaagctcgatgttaagatccacaggtcgagattgatgctaggtcaacacaaacctccacggtagctccgagtcgcacaactcgacaccaaggctagggtccgaagaataaaaataaaacctccaaatgtctaaatgtgtatacttttcaaaaaaggttaaaaatcggtaaatatactgtaagagaaattcagagttaagatctgttttgtatgtaaatatttcttatccataagtgcacgtattatctttgtcctatgataaactaacctttagacttgtcctaagtcaaattattttaaattaaattacatttataaaatttaatatttacgacaagcaattaatataattagatatgtcacgacatatattttcataatgtatttatttgatgccaacctaactatcctacttactcctatccctaacatatatatctattcaatatgaagacttggttcagggagaatccacaacctaaattttgggagcgtagtatagtaagactgtgctcaacataccatatattataatcgtgcaaaacattttgtgcccaattgccctgctcacaaagttgagtttgaaataggaggtagttaagattgctgacagcctaacaatatgtcatctatctctatggaacaggaatacaatgtgtttgtacgtaccatctaccatgtatcctcctctataaacatacttgttttgaaatatcgtttggttcacaaaatgcaatgtaaatggcaacggtaataattcacactcgattactagcgggaacaagattgaataggacgtcatcgatttctagtgtgatatctgattacgattggacttaaataaatatggtttatcgttatcggttaccatttccgtaaaccaaatatcagttaatagacagtatcgtacataaatagttttatagtcgatgtggcattaaattaataacgagagagatacagtatcctttgatgatataacgcactagaaataacctaagtgagccactgatgtggcaataaaatatgcacagcgacgatgtggcacattgccggcctttactactaccgaattaacatctccagcggatcctcgcgaaaaaattccatccacaagctaagagcaacttggcattgaagaatggcgattggcgatgtgctcatggcctttcccgagcggaacgactgggccactgcccactgagctcttttttctcacgttgacaggggtgttttgttgtctaaactaatgaatatctgctaagaaacaaatgcaagttcacgaacagctgaggaatagttgagtgatacgtacggagagaagataaagaaatacacgatcacgcatatcggcatatgacagcatcagcagcagaaatatttatcatgatttagttcaaatattcgagaacggttcagaggacaagaaatcagaaatgcacagcacggtcacgcatgctacgcattaatttaataatagcattgatttaataataacacatgccgcatggcagtatggcagtactatagccgcgatgtactttttttccttaaaagggaaaagagtatgttacagcaaattttaaaagtgatctagcagatacacatcttgattacgctaaccagtttcttaaaaaaagaatccagtactgcagactatatgcacaattagggcacatggcagagaactgagagcaaagctcctacggccatgggttgtttgagattttttttttcgttaaaaaataacactagtacggttgtgatcccgtcccgccgagtcagcagatcacatcagatcaaaatcagcgcgtccaagcatgctcccggcgtagctacagtacacagagggagacgaaccgggagcccctggccacaagtctccccggcgagtcctccaccacaagctcgcccggcagctcactgattgctcgagttgcgtgctcgcgcaggcgacttatatgcaccactcgcccccgctggatctcccctcccggcctcccctcccttgccgtccacttcttcctccaccacagtcatcagtggcgttatcctcttcgttctcgcctccctggttgttgttggctgggtgttggcgagctgggagtagagaccgagaagtggagcggcc

SEQ ID NO: 51 - DNA, 2823 bp, Zea mays
ttgtagttgaggtgggtacggtggcgtggccagctggcacccagtgaggatctcggcgatgccggtacgccgccagcgaccgcggcagtaggaagatccatagtggcatgggcccacgtggcatccacccgaggggagaggaatacgcgtcgagtggctgacaaattaaccccatccacagacacagcaggagtaggagaatagtgcctgcgtgggaagggcttgccttgcgggccccacctgtcggctgtcggtgcgctcgctgcgcgagcagtagttgggccacacaggaggaggggttttgggtcggggtttaattagggtttcggcctaggctgcctacccaatcctttatttatttattctgatttgaatttctttcttgttttcaaaatcagttttttgatttcaaatttgtttgagtttctcatagaaatcaagtgcacagatagaagtaccagcctgaagaggtatatttatttgtacatgtattcttctttatagtatatattcttttcttttcttctcttttcttttctatttccattttcaaattctattttcaaacttaacttgtcccacgaatctgaatacaaatgcataaaatacaagaacctcagcatgaaatgcatatttctatatttatttatttgttatttgactaatttaattctattaattgaatatgcaaaaataaaaggaaaccaaataatctccaaaggtcccataatccccaaaacactaacatataaatagattcatttatttatcttattatttttctcttatacaaattttgggctttacacttcctgtttactaaaaatctccactaatgcaaaacagaagtttcttcctttgtgcaaccccttctgttcacctctccctgctttcccgttgaaatggtaagaaagataaaattatacataaatggatatttgtatcatgattgttgactccagtcccacattcacagccacctagccaacaaaatatatgtctttatgttttttactttatactcaaacatcatatatatatatatatatatatatatactctaacctacctagacaacaaaacacataagttttgttgttccatatactcaagcataatatatatatactcaagcataatatagatatatttatctagaaaaatgaaaaaacaaacaaaacttggtcgtgctgagccaaacccgctatttcgtatctaaggtccaagcacgagacggtaattgggtcaggccgtcacgggtccaatggacaataggtcatatctagctcggctagttgcacctaaggcctagacacaatacgatgattgggctagggacataggctcggtggacaacgggctagacctaaccagccgtgtcgcacctaaggcatagacacaacatggtaatcgaacgaggccgacatggagaattgaaattagtgggagctctatcaaacatgccctctcacatatagtagcattttatattatgtagcgataaaaaaagtaatctataataccatacattgatatcagtatatcttatgcaatttcatactatatggcatgatacaatcctgtataaaaggtaaatagatgaattaaattgggaaataaagcatttggaattgggctgcacatccaggagttggaaggttagtttaaagtcaacaaacaaatcgcagctcatagacctgctttctgtaggtacattcaggggcggagggcccgttatggcgtggtatggcctgcgccatacctcgtctcggctcaagacaatacgaatacataaattatctaggttttcagccgtcctacgtctgacgcctccacgcgcccacgcgtgtctccgcacacacgcacggccgcacaggcaccgctcgtccgctccagctcttgcaccgcacggacagacacagctccaccctccatagctcctctcgccattgcttgtgtgccagatcaccgcccccggcctaagtctccggactgtgcatccgcggcggagcgtctgcgggcgacgacaccagtgcggctcgccccctctggccgtctggcctgattgccagaggatcgaggtttgtgattttgtgaagcgcgtgcacgtggtgacaacctgagattagaggaatcgtattccaaatttttaattcaaacaaaacccaggaagagggagggtgtgtcgtgtgcattgtagacggtagaaaattgaaataaaaatatctatatattttagttatttgtgggtgtggaactcaaaaaattacaattatcagtattgtacaggtcggcgttgctagactctacttatatattttgtattaaatttagctctttatttaatgctaatttttgtttcttttttgcttgtatacttatattttttgttaattaaattgctgatttgtatatactctttaaaaaaaaatcttcatttaaggtactttcttcttaataatgttatttactaaacttctcctttagttaatatatatcgtgtccattgccataccttattttcgggttgtgctccgccagtccgccactcggtacattacctcagctgagacaaaaatggcaggaggggatggaggaaggcaggggcaaaatatctcggcctcccactccggcttccatttcatccacgatgatgatctcgttctcgtctcccagccccgtcgccgctgacgtggcgcccaccgcgcggaaaaaaatattgcagatattttcctcaccgctccttcccccctctctgctcgtccttgcctcccaccgcaccgccggctcttgctctgctcggttcctcctggcagcaaccga

SEQ ID NO: 52 - DNA, 3036 bp, Zea mays
ggatgtcagacggatttcccgtccacgcccacaggttgaggcagcacgcgtccgccttgttggaggagagacaatcttcttcgacgtagtcaaggacgcaggcacgagccaccgagcgcttggcgatgttttcgttccaggcgtggggagggatgccctccaagcacagtctgacatggaagtagagatcatggcgctccccgagggcgaccagctgccatggcctgatgcggaagtcaaggttgctgtgtaggaagtctcttgcagcgacggccgcctcccggtggtggtggtgtgtgaaggtgacgaggaagtcgcccggagggcttcgagccaccttgatgtcctctgtcctcaccccgaagcgggagcagaaggcccgcatcacccgctccgggctgatgtcggggcggtcacgcccgagccacacgaccaccgcatgggaactcagccgctcaagctcccgctccatgttgctggtggaggaggcgacgacgcaggaatgctccggcggacagcagggtcgccgggttcagccatggacggggcagcgagcacgagcggtggaaagttgacgttgtcaaggcgtggagcttggcacttgggggttggaggtgtcttactacccctcccggagcactgccaggaacggtgtccgttgcgcaggcaatttatgcacctcaccgggtctctgcaatcaatggcgaagtggcctctgcccagacagcgggcgcatttaccttgcagacttaccagcagacggcgaggagtcggggtcgagcgaggcacccatgtcgtgcggtctggttccgcacaggcagcgcgtcggcgcctgcgccgaatcgtcgtccagctgccaggagcttcgtcttcaatgcggtcgcagccatgagttgtcggaggatcggtggagacatcaaagcgactggatttgctggtggatttgggggaggagaggtaagtgacgtctggcgcgccgctcgcagtcaatgcaaagcgaacgcgcttggaggagtgaaggacctggggtaggctggcaggtggaggcggcggcagcgggggcaggggcatgggaggccgagctagcggtgctaggggagtacgctgggtgggatctggcttcctgggggtgggatctgccgaggacgacgggacaacgacagatcgggcggatgcggcggcggggggagcgcggtcgccgtgggggggagagcgggtggggagggagggcatcctgatgctcacaaagctccataaataaacttatcatttcagctgaatcgatttaaggggtgtttgtttggattataatctgtttagattatataatttttttatcaaattttaaactaagtgttagtttataatttattagaaaaaaatgagcctatccctggaaaaggatctgttctggagtaaatgaaacagatccttgtacggctatatccattccatcctctctaatccaaacgaaaacatgtggaaatcgtttcgtgagacagagagatcaaggaccgggacgtgctctggtgggcttctgaccacccacctatgcgacattggaccgagcaatgacaaaaggaatatactaccggccaagccgaggtccggttgccacttgaagcccagaaacgaaggtgcaacttaaaaaaagtacacgtgtctcgtgagcatcctataattcaaataaaaaaagtaaaaacgcagcgcgaaaaccgcccggtttcccatctaggctaggccaagccgaagccgagccgaccaaaccgaagcggcgtcgctgtctctgtctgtcgcattcgctcgcatactactcgcacgcgcatcggctgggaatggatcagcgcgggcgcgaggcgcgagcgcaagcgggggcgcagcagccaatggggcgccggcaactgatcggatcgcgccggcgcctcgtgtccactacctcggcaccgcccagggcccaccacgcccgctcccagccgctagttatagttaccaaacaatttcttctttttttctcctctaaaaagatccttctggtaatttggtgctcaaggcgagacgcccatctcccctctcatcgtctctctcatctcatccagcctgtgccaaaacaaaacgagaaaaaaaagtcttgctgctgctggtggtggagcgagaaaggaaaaaaaaaaagaaggggtaatctcaggaaccatctagatacagcggcggtacgtggactggactggagcgagcaagcctgcgccggcgccgccgtcctcccgaaacagaagctggtaagatccatcctgctcttgagttcctctctccctctctaatcgtttcctgtcgtctttgagctggcccggtgctgttcttgcctcctttgcggggctgggaaccttgagttcctcctatctgttcttgggttaagaggcgtttttacccccccttcgtttctggcgactggtttctggtggtcgtgtgcgcgccccccaccttctgtctgactggtgtttggtgtccttgtggcgattcttcttcgttctctctgtttctgaaggaagataccattttggatctttgctggagcgctttactgtgatactactgtctgcttttttttttccctactgttggtttttctttgcttctgcagcttctgatccacagctcttgattccggaaggtgacaacatgtctattcgatttccctgttttttttgttctttattgtagagttctaggccccttcggtgagatgtatgcgtcacaagctttccgtgttttccagcgctgtttgatctgagcccaaggtgggctggcaactgaacattcctgcggtagttttgtttgaatataattactgttgtagcgacctgtttcggaatatgattatttgtttagcctacagcttctttttttttgcggataattcatctaattttctgtccttttggtaatttgtagtagttggtcaagaactggggatactgagttgaatatgatctcaaatccggtggactggtatagtttcggacccggatagaattggtaggg

SEQ ID NO: 53 - DNA, 3000 bp, Zea mays
tttggaaacaattgctgcatttatccttgattaactttcttatccctatccttgcacctaggtaaattaagtacgcttaggcctatttagaccagtagaagtcaggtgattccctatcacttgcgagatataggtgattaccttatgcttgattcggtactgtcatcggggaaatatacatgataatatgaatgttaatattaggtcggacaggatgtagatagggaaacaacaaggcatggaggtcttgggtgtctacttattcccgtctgtttcgattaaggatcatactgttggggtcccttgaataatgttaaacgcatgcctaatcacttagctagccggataactcgttccgaccgcgaagccagagtactattccagccaaattcaacctcgcactgcacctactggtgtggttaaggagagacggggactcggcgagatgacccatggtgaacggtgcgccctaaccctctggtagtcgggaggtccctagatacggtggctcctgttgaatctgcgacatgcagtcgggttgcttctagaatatgtatggtggtgatcgtatgccacaaagtattgtgggtacggtttgtgttaggaataccccgctagctggttagtaatcaattcgaatcaccatcgctcctggacagtgagcacttgactctagctatctcgtcgtagtaagaacaatgataaccatgagaatgatgatattgataaggtatgatgacatgaataattttaatcaagggtttgggttactcttgcttgtctactcaataagatacttgtcaaacttgattaatcactaaagctataactaaacatagtgaattggcaaatatcatctagctaatcaggtgctaacctagatttaccgtagaataggtataaaagtgaatggctaaaatatgattaataatcatgatgccccttaagttgctaataactccattaattcatgtactcttccaaaagaaagagctagctccagataaagccttgcatgatacttgatgtcttttactttcttatttcctggttttagacgggtaagtctagttgagtacattcgagtactcagagtttatcccaccatgttacaggtgaagatgtagccctgctgaagatggtggataagtgccagtgggctcgaccttctatatattagcctgcaatgtattttaaaactatggttatatctatattgcttaaagttgtatttctttcaaatcaagttttgtactctcttatctccttatttgtaaactcattgtaatattatttccgctgcaaaacttcagtatgtgaatgtgtatttacttaatatgtgatcttggttgtgagttgatttaccgaggtcctccaggatactcggcggtctactggatctatataggctcaagtatgtttaaacaactgtggaagtagatatttttggtacttgtgcttttatagattgggcggtcccatcaaaatgcccttattctctgatgtatgtaggatgcaaagatttctttggaggaactttgtgatcgatctgttaagttatgaggacaattcatgctgatatgtcatctttgcaaacatataacaaagacttatcaatatcgctaaaaaagattaaattaatgtatgagattagtgttttgtcgatttatttgtctatcattcaaaattctatattgatttaaaaacaattttgtgcgatattataatctttgttcgacataagttccttctatttgagtcggcgtatttataataatgttacatatttatatcgttaatataatattatcgttatgatgatattttaccgcacgaattttacatatcatagtgatgttttttgttttgtatttatgttttatactaattttcaatgcgcacagaagaagatgatattttatctttgtttgtccaactgtaccaaaaagacgtatataatatgttgttctttagggatttttgtagcgttggttaccatttgtgaggttttaattaatctgactatatataaaaaatagtaattttttgttttaatgtgctgacactctctagtggatttgtgcacattatatccatcaaaaggagatgcttgtataatattacatttgacattgttgtcacgagtacatctttttagttgtttgttgaaaaaatgaggatgctagggttcgaaccgtggtcgtttagatcagagcgcccatcctctacctctgcagttcatgcttttttgggttatacaaaagattgatagatcgaatatctcatttgaataaggtgtacctaaataacatagcaagacacggacaactaactagtctagatgaatttacattacaaatttgaggaaatagatcacatcattttttataattttcgacgacgtacagaagacaacttcagtgtcttttgcttatgtgaaagaaaggacaaagaatctcggatttaatcacaaaaaacagaaatacattttatgctctataagagtttgaaaccaatgcagcccgtttctttcatgggcctcaaactcaaatacccattctcggactaagccatatttgctttggaataccaaatgtgcgatacgtcatgtcctgcttgctggccgttgtctcattgtctggccgccggaccaaatccgaaaacccaccgagtaactgacaatctcgatccccgcagtcatcgcgggatcggcccgtcctcgccggcgactcattcccgcaactcacctgctctcaaccgcgaactcggcgccctgcacggcctccaagtcgcacgatgcggcggcgcccacatcatacgtggctgcgtctccgcctccgctttcgccgcgccgacgtgtcagcttcccgtccactacagagtccacattgtcctcctattacttgctccgccggcaactattagcccctccccagtcgccactaaatccgctgccgtttcttctcgagtgtgaccatggcggctcagggatccctcgtc

SEQ ID NO: 54 - DNA, 3000 bp, Zea mays
cagctgtcctcccgcaaggctccagcgctcctccgacggccacgacatcacatgaacagggtgccaaaacctctccggctgccacgacggcatgtacttagggcactagctcctctctgctagacacgttagcacactgctacatctcctattgtacacctgggccctctccttacgcctataaaaggaaggtccagggctctcgtacgaggaggttggccgcgcgggagaacgggacggcgcgtataggcctctcgctccctcccacgcgaacgcttgtaacctcctactgcaagctcacccgacctgggcgcaggacaacacgaaggccgcgggtttcccctttacgcttgtctccctctttttcccccctttgtgccccgtctcgcgccgacccatctgggctgggacacgcggcgacaatttactcgtcggtccaaggaccccggggtcgaaacgccgacagcaacaatttaatctacagtgcaaaatcgtactttgcacgaggtgtggcattttgaaactttagttgtccacctaggtgaaggtcaaaagtggaacactctaaaaattgttctttggaccttataagacctgataaaaaatgacagactcatggtttccattctgttcatctaaagttttattttccaaaaacttcttcctacaaagtccttgaaaaacttcatccttcattaataagtatgtaaagccgtttactaagtaaacatgtatcttgacctttaagatttgtgaatcctaagcctccatgacccctaagcaaaaatcaaaatgacctttcattttgcctgtatttttttatggttgtcttgtcactctgctagaagaaactagatcagtataagtctatttttaagactatctcaaacaaactctttatctcactctcattttcactccctatttcaaacttcactctgaaaatagtacaatctacaatacaaaacaatactttgtacgactgtttacacgacctactagagataggggcggagggcccaatatggcccagtattgcctgggcaataccttggccgacccaataaaaaattagggcagccctcagccgaccaaccgcctcaatcataatcatcatcattcctcaacgagcggccgaccgttgaccgagcagcccgagcagcggcctgagtaggcgagcagcggcgcggctgccgcctgcccgcgcccgcctccacggctccgccggccaaggcacaaccacacaatgcagtgagggactgagggtgattatttttttatttgaatagaaataaaataacgtgcctaatccaatagatttttcaatgtgcagattttccaatttccaaatagcatacatgatagaaacaaaaacaaggcaaagaatatggcccaaaaaagtatctctctttattatttgaacactctatgttgtaatatcttctaattatctaatacatgctacatccttcgtaaaatgacagatttgaagagctatttagttgagcttctagtggaagtagaccaatcactcgcgctagtggagtctgcaattgcctagagccctagatctcctagaactagactcaactagaggtatattcttatttcacttgttcaacaatatttacatcaatttgcctttcgtaactcattttttcttttttccccagattttatttgctatatgtcatttgattgtaaatggattataatcaaaatgactattaaataaggtattttttaatatctattacttattttatagctacaagttactttaaactgtatcgtaatatttttattcatcgttgcgttagcaacacctagattcatcatgtacgtaccaaggctacttaaaaccgagtctatcgaaatctaatcgtccacggttaagttaaaagctttccttttccaagtacgtacgtagtttcttttttaatgcgctcttcgtcaacttcgcaatccttgtcactgggttctctatggtgttcctcggtgcttgaaaggattcatcgtctttaccgtctgtgcaagcatcccaccagggtcagggtcactgtccaaacgagacacaaaagcagcaaaccccagccggcctaaattttaatcatcacgtcagacatcaagagaggaggctgacttctagcccttctcgtcggcacgcaaacagatcgtcacgacaacgcgccttgcacgcggccacccgacaatccgctctcagctgtccagcccctgagatgggcctctccgaccctccgatcacaatataccgactcagcggctcagggctattccggtaacttccgcacgtgcgcttttggaccatcaccgcctcccagatatttctgcccatggacccacagctcaactacctaccttggtcactaaccggtgccctcgattcgcaatggatgacagatgggaccaacgggagcacctgggcccaggtggcggtgtgagttagtattgagtaaatgacgcgggagacgagcaggacggcagcccacacatcgtcttcttcggttcgtctctgctctgctgctgggatcaccgtcaccggcaaccgcgagggagggagagggacagagcgaagagagagaaaactgaagaaacaacattttccgtttttcttgcttagtgaaaccagtggaagagggagagaaaagaagacgaagacgacaatataagtaaataaaaaaaaggcagcgagcgaggtggggaaaaaggggcgagttgatagagagaaagatagagagagaaggcgagggaggcagggatcacgaggtgtgcttcctcctccgcccaatcgggcccaaccaaatcccgccagcgccgcctcctttatactcccacctctttcccggagcttcttggatcacgggacgcgcgccgcgggccggtacgctgctggtgctggaccgctcgactctcgcctaccagctgctgctttggctggcgcgccggcgagagagagagagagagagggacgcgacggcg

SEQ ID NO: 55 - DNA, 3027 bp, Zea mays
tgggtggggcggtgatttatcatcttggattcgtgctatcaatacaaggtgcctgtcatgggtattcaatcattacaaatatatatatatatatatatatatatatatatatatatatatatatatatcatggatacaaagaaatatgcttaactctatgattatctctagggtatatttctaacaatctcccacttgcactagagttaatctagaagatatctaatacttaaagatctcatgtgtgcctcatgcttgggttatggaagaggttttatcaaaggatcagcaacattcaaatctgtatgtattttgcatatctttatctcaccccgcataacgaattcccgtatgaggtgaaacttctgcagtacgtgtttgttttctggtggttcccttgctcattagcttgcgcaatagccccattgttgtcacagtagaggttcaatggactagaagcattaggaaacacaccaagctcgatgaggaacttccttatccaaacaccttccttcgtagattcagaagctgcaatgtactcggcttctgttgtagaatcagtcaaagtctcctgcttggaactcttccaacgaacaacacccccatttattgtgaacacaaaacctgattgtgtttttaactcgtctgtgtcagtttagaagctagcatcggtgtaaccagttacaacgagcttctacttagccccatataccaggaatatatctttagtctttctcaaatacttaagaatgtcttttacagcctgatgcctactcatagcatttatagcgtatgaaacatctggacatgttcatgttaacatttttaccgaatacgaatatagataaatcgaatgtgtctgaatcatctctggtgacggccacagcggtgaaacatgaccggataagccaacagtatcataatctgctagcctcaatatcaaccgtccatctcgtaatcgagggatttgagatcctctaaccacgggccgaattgtttcttcgcccaacagatattttccagtgccgctctgaacagtgtgatgtggccgcgcgagccgcgaggagccagctagccatggtcgtcccagtcccgccgccgcctctcctcgcttcccacgtggccgtccgggccgcggcctccgccatatcccacggccgccgggtcctccttaacggcgaccacccgccgcaggtcgcggccctcgggcgcggcgactgggtcaagctcatctgcggcgccagctttgaggtatcatgccccttccaccttgctgcttcactcgtcactacattgggctccagctccagggactgttggctgttcatagtagggtcaaatcaaatggggctccagggactattggctgtgcatagtagggtcaaatggacaggaactcatgaaaccagcgggtgcttcctctccatctgatgttgaaagctgaaaaacagagggggggggggggggggggggtggctagcactttatgctggtgttagcttagaaggaaaagtgaatcgggtttaatctgtggaggtgaaatgatggtgtggttggtgtttgatgtgctaccacagtaagagtaccagtgaccacgatgcaatatgcacaacgagtgaagaactattactgactgaccgtgctataatcctcacatcgtttacatgttcattgtccttgcaggatgcagctgatgtcaggaatctctcccttgtctacactcttgctggaggtacacatgttgactcaactggaagacatttatttggattggatatttatagcattttagattgacattgtaacagtccacgttgcagcccacatgctttctttatatcttcagtcagtaaagaattgaggttttaatcacttatatcttgaccttttgtttactgacccgaattgcagaaaaatcttaaaacactgacattaatggaacacaaggacttgcagagtttgaaaagcacggcaagataggtctacagtatatattacacagtaaatgtgataatgataagctaagggcatgtttggatataagagctaattgttacttagctaaaattagcccaagtgctccaaacagggctaataggtgatctatttttttagccaagccttcaactagtcgttactcaactagaagccaacctcagctgatttaggacctgtttggatacaggaacttattactagttagctaaaaattagccatagtgcatccatactagagggcttatagatgaactaattctttagccaagtctccaactaatcgttagtgaactaggtagccgaactcagctaatttgagctattttttagcccaactagtaactagccctagcttatccaaacagtctctaaacatatgtgtcttacaacttttgttatgaaacccttatttcagtatctcccaatgaagtgattggggaattatagggcctgattggttcaggttttttttttgaggaactttttctgggaatctggttgtgtagagaatctgagtatcatgaagattacatgtggagaaagataaacgagtctataaggtttaaaatgtagaaagtgatggtgtcctactatcgccagtgtttttaaggtggcgcctaggcgtccaggcgcttgaagaattatgtgcgccttgctcgcctaggcgtccaggcggtggtccaacgtctcgcttcgccttaccgccttaagaacactacctatcgcaacgacttggccaatgttcacgttaatttttggcagtttttactaaagtgattctcataaaagcgggctgaatagttgggtgtttggcagtctgcagcagcttttggtggccaaaagctgaaacaaacagggccatacacttatgaattgcaacttgatgttatacacttacgaattatgggcaattctgtacatgcagtggattgcattgattgtgcagcagatgcatctgtggtgggagcagtgaatgaaggtattgaagtagcagcatcaattgtaccaacagttcaaaggccttggctg

SEQ ID NO: 56 - DNA, 3000 bp, Zea mays
aatactaatttgtgatagagcgagtataaaatgatctcaagctggcgagtggcatagcccacaaccagcccaatgtctttcatgcagctaggctgtcttctttaaacggcccagttataccttacagtattggaccgtgtgctagtctgcgggaaacggaatgaaaactgaaaagagcgctcagcacatcaccccgtcccctttaattgccgcataattctgaaaaaaaaaagaacagtttgtccctttaatagaagagactaaaatttaaagtgagaacagcacgagactgaacaaaacaaaaaccacatgcgacgagcaactagatgatctctgttgcgttacgtttttggattgtccgagttgtgtaataatcttaaattaatctcgctgaatattcgtcacctgaacggaggctgtcgccagctgtgaggagtcgaggtccatcatcagctagacagcaactgcagttctataatgtaacgttgagcgaggtgcatgcatgtatcgattaattaaattttagaaacttaacgtagcgaagaaaggggagcaatgcacgtactgacgacagggttaggatcgcgtgagaatggaatcaaatctgaaagctgtaagccatagcctggacgattttttaaatatctagtactctctctctcctgtacgcggttgacttgttttgaaaactttaaacacttgtcttatttaaaatatttattcgtaaatgtaaaatttgaaatcacgtttaaacaacattaagtgataaaaaactcataacaaaataaattataatttgtaattttttaataaaataagtgatcaaagttttttttaaaaaatcaacaatatcataatgttatatatttaagaacggagataataataatatcgaacagctagcacgcaggaaaaaagaaaagtcgtctgtgctgctgcgattggatgggagaggaagagaatatactatagttgaattgaagattcagagcgtacgtacggtgggtgtgtgagcacgtaagccgattacgacctgccaaagccagagccaggtgaatcgaatctgactctgcgcaagcacctccgattaatagctgggcttgcgtatgtcagctcgtattcgtatagtttacaactacgtcataaacatgggtgatcttttctataagattttaaacttaaattggtttgatcagagaagaactgctcttttttcaaaccgtagcaaaactagatacggagccctgtcggttaagcgctatacaccgtttgactttgtacttcacagatcagtcagtgagctagttggacaagcaggacaatatataaattcgaatgcaagaatcaacgatcttattagcttgtcggcgccgcaccttgggcgtggtatacgtcatttgaaatgcaaacgtgagtagctagtagctactgtggcgtcacaaaaaaaaacttgaggcatctctcctaacccctccggcgccgttttcgttgaggttattattgtagctatcatgcactgtcacgcttgcgtcactactacgtatgtgaattctactactgaatctttggaaccaatacttacgacagaaaatgggtatatactatgtaatatgaaactatattacacgacagacattttattttatttttgtgtgtgaaacttgcatcaattttaatttgactaacctttaagatatatcgttattggagagtgtacagtacattattagccatattcggagtaaaataatctaagaagaaaatgctctcttctcatatggtatactgtagtgcgcggtaccggcagaatccccgtttatatagagcactaaattaaagcatgcttggaagtacgagtacgcatgaccagaatggcgcatctaccaatcggctcattacaccatggcaagctgcaaataaaaaataatatataatagagaggaaatcaaactctattgatcggatagagagacgccagccaccagcagtccagttgatggtaagcttcctttaatttgcagacacatatgacgggaacatttttggtgtaaacaaatccttccgtacaaccgtgtcaatttttaatctgagccacatgatgatgatttaaagggacgcgcgagagtggataatttcgcaattaaccgtccgctcctaatcacacttttgcaaatctctcctctcaccccgcgctcgctctctcggatcaacatcatgtgacccagattagaagttttcacggttgcacagaagggttggtttgcaccagcagatatgttctccacatgagacccagagtgaaaaaaaatcactaaaacattaactaccctaaaaacaacagatctattaatgaattagatagactttagctagagattaataaatcctattacctcattaactcttcaacacctccaataactgctaatatatggggcctaaattttcactggcagcgttagtacacgtacacttacttttaggtaaacgtctagccgaggtagaaaagcagtaatcacacagaaaagtgtgaaaagatggccatggtcatggacctacagtacgccacacacccgacagcgacaggcaacgaactccaaaacatgtttattaccgacacaaaggtccaaaagatgtcaaaggtttgcaccgctagatttacccggagaagtttctccggactccgggccccgcaaagttattttttttctggctttagatttttttagttattatttttttcaagaaaagagaggaatttattatggacgtagtaaaagtattcgctagagatagagattattagaggtagtcgcagtgttgcacgctggccactaacttcacctcaccgcactctatatagctgccaagcttgaccgcagcttacccagcccaataagcagcgagagagggtcgtcgaggtcgtcgtctctagctagctgctaagagagagagagagagagaggtatacgtaggaccgccggcaactagctaactaac

SEQ ID NO: 57 - DNA, 3000 bp, Zea mays
gacagaaggcaaggatggccttcctgatttgttctcaacggctcctagctgccttggggctataaaagggacccctaggcgcatggaggaacacaccaagtattcctacaacattcttaagcaccaagacatcgctctcgcgcattcgtttcattgtgatagcatctagagctcttgttgagttgcgaactctttgagttgtgttgcgagctcttgttgcgacttgtgtgcgcgttgttgctctgatcttttgaagtcttgtgtgcgttgctcattccccctttgctctgtgttctttgtgaacttcaattgtaagggcgagaggctccaagttgtggagattcctcgcaaacgggatagagaaaaagcaagcaaaacaccgtggtattcaagtgggtctttggaccacttgagaggggttgattgcaaccctcgtccgttgggacgccacaacgtggagtaggcaagcgttggtcttggccgaaccacgggataaccactgtgtcaactctgtgattgatctcttgtggtattgtgttttgttgagactcctttctagccacttggcatttattgtgctaacacttaacaagtttttgtggctataagtttaagctttacaggatcacctattcaccccccctctaggtgctctcagtgcctcactccgcctccgtcgtccttgttggactctatcgtcgacgagaaatcgtgccggatgatgcggcaaacgttgcagttcccgacccgcagacgatgtgcgagccaacggagccgagagaataggagatggaagcctgcgtgaaagctccgtggaagttggaaaacgtggtaacaatattgggccagcacttctggagtctcaaattgtcggggaccataattaggggtaccctcaaggctcctaattctcagctggtaacccccatcagcataaagctgcaaaggcctgatgggtgcgattaagtcagggatcagtccgttcgagggactcgatcacgcctcgcccgagcctagcctcggacaagggcagccgaccccggaggatttccgtctcgcccgaggcccccctccagcggcgaatatatttccggctcgcccgaggccctgtcttcgccaagaagcaaccctgaccaaatcgccgcaccgaccgaccaaatcacaggagcatttaatgcaaaggtggcctgacacctttatcctgacacgcgccccccagctggcagagccgaagtgaccgccgtcacttcgccgctccactgaccggcctgacggaaggacagcgccgcctgcgccgctccgactgcggtgccacttgacagagtgaggctgacagggcagtcaggcccggccgaaggcaccataggaagctccgcttcgcccaacccagggcttggactcggggctaagtcccggaagacggcgaactccgctccgcccgacccagggctcggactcgggctaagtcccggaagacggcgaactcagcttcgcccgacccagggctcggacacgggctaagtcccggaagacggcgaactccgctccgcccgacccagggctcggactcgggctcatccccagaagacgacgaactccgcttcgcccgaccccagggctcggactacgccctagccttagccgacggtctccgcctcgcccgacccaggggctcggactcgacctcggccacggaagacagactcgacctcggcttcggaggagcttccacatcgcccaacctagggcgcagaccagccacgttgacaggaggcgccatcatcgccctaccccgagctgactcgggccacgggggacaagaccggtgtcccatctggctcgctctgccagataggcaatgatggcgccccgcatactccgtgacgacggcggctctcagcccccttacggaagcaagaggacgtcagcaaggactcaacagctccgacagttgtccctccgccaggctccatcgctcctccgacggccacgacatcacaccagctgggtgccaaaatctctccggctgccacaacggcatgtacttagggcgctagctctcctccgctagacacgtagcactctgatgcaccccccattgtacacctggatcctctccttacgcctataaaaggaaggaccagtgccctcttagagagggttggccgcgcggggacgaggacgagacaggcgctcgcgtgaggccgctcgctccctctcccgcgtggacgcttgtaaccccctactgcaagcgcacccgacctgggcgcgggacgaacacgaaggccgcgggattcccacctctctcacgccggtctccggtcgcctcactttccccccttcgcgctcggcctcgcgtcgacccatctgtgctggggcacgcggcgacattcactcgtcggcttagggactcccggtctcgaaacgccgacacaaatatagtactcacgaggttgggccctaacatgtttggatggattttattgaaatagggctcttgttggagatattttttgttgaacaagccctatattttaatttgtttgtgtttagggcttgaatcagagttgctctttcattcaccagacgaactaactttttacgtatttattattatctactatctttattctcaaatatttgttgatgactaatttatttttgcactaaaccacgacaaataaaaaataacaggtacagtatattcaaagaaaagtcccgtcgcaacaaagatccaaccatatagcgagcgtcggagtccgatttccaaaataaattggaatgctatgtgggcatccactgtaagcaagccagccgaacggcgtcttttgaatgggtggacgaaataaattctggcgccaagaagataagagcctacacgctggctgcactcactccatccatcatctcattcgcatatctggggcagggaagctatctgtccaccagaccagcactagcagccgctcactccagccattacccgcagctagcaaacaa

SEQ ID NO: 58 - DNA, 3000 bp, Zea mays
gagacaagtaatgcattaacctctacttaagtattttgactaagatagatgattaaacccacaaacaaaaatttgagcaaggttagcaaccatagaaaaggatgatgattgctagaaaggatgatcaaatactcaacattgaaacaggaagaagaaaaccgaaataaaatgactcaagacaaaggcataaagtaggacctttcgtttttttaccgatcaagatgaaatagggtgtgtgatcagatttaaaatagacagtcatacttttaagaggcgagtttaattagacaacttaggctaactgagcaggattccatcatggcgagcgagcgagcaagtgttcacagctttgtcgcggatttctcatccgacgaacctaggtcgtaggctcctccccatgcatggaccagaagaagagggatgagagaaaagtctaacaagtggaattcactctttggtgagagaggaagtgatgggaaggtctatagatgacatgtggggtaagaataacaattttttgagaaagccacaactgctcaatccaacaacttttggctttctcacaaccgaaacttcacaacaattttttcccacatcctacaactaacgcctactctttgaaaagtcataaatcaaccaaaaacactctatgcctctgtctatgctgtatactttcccaattgctcttgctctaagtaacattactcaagatcacgtgatttatatatgtgcatgggtcgacaaatctagccaacccacctgcgttaggcccatccaaaccaggtgtgtttggttatgcttttgaaacctacttctggggtttagttttttcacaactacttaaaaaaacagtttttctgtagtacaaatttgaaagcaccttagactctgcttttgctacttatcgaagttcattaaattaataaacagctacaataaattgaaactaaaatagggttaaaataattaagtgttataatacatggaataaaaatactttaaaaaaatattacaaatggaattaaacaattatttatttgtaaaaaaatattaggaacacaaatgtggaatcagttttttaattagatatattgattaagagatttagttaaatagagtgtgtatcaacaatatataatttgtttacagtgaacaactcacaaccatttaaaccaaataaattttagtttttttttctcacaacagcttttttacatcagacaagtcacaacatcttttttacatcacacaactaaaccaaacgcaaatgattttgactggatttaggtttatacccatcagacccgtaggtcagaagtaccacctaaaaataaagcgtgttgttcttccttcaatcgtgaactcgatctctcgctcctcacgaacttgcatcgaagtgtcgtcgtcggtgccagcatcttgtggcatgataggaaaacctttgtatgcttaatcgatccgtctccggtgtctaaaccctaaacccaaaaacctatgtatgcttaatcgatctgtctcctgtgacagctattgcctacggtgctgatgtgcattgcaactcatctaggtctgtaaaacaaataacacaaacaattataataaaaacgctaaacagaaggcactcttttgtgcctttttaggcaccgataacggtcctttcccctaagtttggggggtcgggttacctgattttttcgggtcgtgtaattcgggtatttgaaaatttggataatgagatctgggatccgaaatatacccatttacaatctctactcgaaatttcgggaaccctaaaattcaggttcgggttcaaattttcccgaattacccgattgtagtaaataataaagacgataaaattaaaataaatattcaacaaaccacactacttgtaagtctcaatttcaatgttcatatattagtgcatcacaaatttacaaccacattataataatacaaggatttagttaattcgggtaaaggtaaatcggataccgagacttataacccgaattaaccaaactaaaatcgggttttcagatttgctatctgaattagtgatcggatataatggctttgggtgatgagtagcggttttttttgtcccgccctattttcccatcgccaccacaccccatatataaaccttgtagccaaggcctccgctcgccgttgaaatcctggtcagccctttcgtctcacctcatgcttattttagactccgggagctctcctatcgtatttatattttaaacttaactctataaataatattatgtatattgtacaatgcaaccatgtacgaccctgtttgcttcagcttttttagtttctgactaccaaaaagtgttgtggattgtcaaaacgctcagctttttagctagcttctataaaaatggatttggcaaaaactattcaaaatcaacataaacacataatcggtcaagtcgttgcaatagtaggaatccattattttctaatcataaatcctatgaacatatttatctttctccgcacgtaatcacagcgatactcagattctctttacaacgtaatcacagacagattctcgtaaaagccagtaaaaaaaactgaatcaaataggaccatagtggcatagtctgctcgagacagtcagcagcttgcatcgcgcatgggcccacctaacgacgcattcatttgttcctcgcgcatgggaccactctagcggtcgcttgcagccacgccgtgtcccgtccgcggcagcccaccccaacaggcgcagcgcgggccgctcccgtctcctcgtccccttttaagcgaaccgccacctccccttcgcctccaactccaactccaaggctccaacgcatctgcacttccttctcctacaaaatcgcagcagcacttcttcctccacttcccaaatcaaagcaggaccagcgcgcgcgcagtgatctagggcgaagcaaagcgaggaacagggaccgtctcgttgggcccggaaaactggcgagatcg

SEQ ID NO: 59 - DNA, 3000 bp, Zea mays
gctcagctgtgaagagaggcgaaagcgaattggaatgatttggaggctggctgccgggctccttttatagggccgagtccgcgaccccccgtgcttatccgcccacgaaaatctcgcaatcagttgagattttatagcgatcggttaggataagcgtaacagccaagaaaccaattaagaagttaagctcgttgcttttttttattttaccagaattagagccaggctctatccatttattcactagacccagaaaatcaaaatttttttattaaaaaaagaaattgattttattacgacatgctattttttccattcattacctttgaggatcagtcgtggtcttctagactctaccaagagtctggacgaattagttgcttccaactatagaactatgacacaatcaaacccgaatgaacaaaatgttgaattgaatcgtaccagtctatactggggtttattactcatttttgtacttgctgttttattttccaattacttcttcaattgagagaaagaaagagagtagtaagaattctcttatcccatttggaaggataccatctttataactatccatgactgtttttgtctctagcatgaccacttgagaaaatgtggaggaaagtaggggaaatggccgaccccgcaaggcgagggcatttttgtacttgctgttttattttccaattacttcttcaattgagagaaagaaagagagtagtaagaattctcttatcccatttggaaggataccatctttataactatccatgactgtttttgtctctagcatgaccacttgagaaaatgtggaggaaagtaggggaaatggccgaccccgcaaggcgaggggccggatttcggcggaccattcacgcgcatgtcgtgcgcccgcgcccttcgccccggcccggccaggcgagcgagcgcgcgcgcgtgtggctctccacactctctcctctcatccatgacttggtgagtgagtgtgacttccatatttaagctagctctactccactagagctagcaatatggtgctaatggttccacctatcctctagccatcctcttgtatgggcttttgagattttctaggatttatttgaatatcttaattgggccaagcccataaatcctaacaggataatccatttctcttactcacttaaatccaataaacattattatttagatcacctctcaatcctcgtcctcttccttccccgtgtccccgtcgtccctagtctccctctccccggacgccttgtccactcactcgcgccaccgctgttgaccctggctgggatagtaacgttaacacggactgttaacacggactatatgctagttatattaaataacacatgcactcagacgagttcatagctccatcagtttgacacaggcctcattgagcggttgggtagggaaaatgcatggttgatactactataacactatccaatccgacatctgacggtctccaaattgcaatgtgaaaggaacagctcactggcggtgtagctagttttgagacgccacaacttgcgtccaagaagacgatgcagtactatctatgtcatcgtctggactggacataagattccagtcacgcgccttggatgccgcggagatgaggaattttactgcgttcgtgccaatttgtcacagaaatggcactgcgaaatgacaggatcctgcacatgtttgtcgttgtcgcagacaatacaaagcgcggaactaaaaaaaaccaactttggcgtgtgcttaagtacaaaactaattatctttttaacagccactcatcacaattaaatatcgtgtgtacataataaccacctattcgggctgctgtatccttgtttgtcttcagaaacgacactgcaaaatgacaggatgtcaggaatctgctatatgcttgtcttcagtttctatgtgcatgcgctgtgctatcgatctcccgactcccagtgatatcgcatctggagagcctgtgcctcagcggctgcaaatctgcaatgcagggaccaacaaaaccacgagcaacagtatcatgcacggctgctctgaaacattttttttcttctgaatccctggtctgcttgttcattcctcattcctctacacgcatattcctacatgccatgcccacacgcaaatatgtcagatgctcagcgctcgacttagccctcgatcacgggcgcacaacaacacagcgacgctatctgaccgagtgttcaaataaatacccacacgggcacgccacgagacgatgagacccctctgctccaatccgccgctccactccaagtcacacggaggcagccatcgtagcctcgcccgactccgcttcccctgttctttgggtgagttctctgctgatccatcctccccctgaaaatcttcgccgtcgcatctgaatgttcaatccgtattcgttcccccgtccggctggtctttgtaatcaattcgtattcgtattcggttagttctctactgatcctcttccctccgaatcttctgccgcgcgattaattccgagcaaggatgggggtaatcgtttcatctcggtagctggaacgaactggatcgtttcgcgcctttgtagcgctggtgtatgcgatgccggatgcccgctacgctatcaaagaacgcccctaaaactctctgaatccgcgagtcattctatcgctgaggtcttgttgcttcgccaagctttgatttttttagacaagagggggaaaatatctccgcttttattaaaagcaccgcccttattttcatttttcttcttaatcttccttgatttctctgtgttcaactatacggcaatccccacatgttctttgttattcttcaccatcagtctctagagaacattgttacgttgctctgaactcttatgacgggaaggtattagcagatcagaggtagtctgaactctgaactgccgatgaactgggaactgactgcgagggctgtttggccacaggc

SEQ ID NO: 60 - DNA, 3000 bp, Zea mays
tactgtcggggaccataattaggggtaccctcaagactcctaaactcagctggtaacccccatcagcacaaagttgcaaaggcctgatgggtacaattaagtcaaggctcggtccactcaagggacacgatctcgcctcgcccgagcccagcctcgggcaagggcagccgaccccggagaattcacgtctcgcctgaggaccccctcaagcaacggacacaccttcggctcgcccgaggcccagtcttcgccaagaagcaaccttggccaagtcgccacgccgaccgaccgtatcgcaggagcatttaatgcaaaggtagcctgacaccttatcctaacgcgcgcccttcagtcgacagagccgaagtgactgcagtcacttcgccgctccactgaccggcctgacaagaggacagcgccgcctgcgccgctctgactgctgtgccactcgacagagtgaggctgacagcagccaagttcggcctcaggcgccataggaaactccgcatcgcccgaagggctcggactcgggctcagccccggaagacgacgaactccgcatcgcccgaccctagggctcggactcgggctcagccccggaagacgacgaactccacatcgcccgacctcagggctcggactcgggctcagccccggaagacgacgaactccgcatcgcccgaccccagggctcggactcgggctcagccccggaagacgacgaactccgcatcgcccgaccccagggctcggactcgggctcagccccggaagacgacgaactccgcatcgcccgaccccagggctcggactcgggctcagccccggaagacgacgaactccgcatcgcccgaccccaaggctcggactcgggctcagccccggaagacgacgaactttgcatcacccgaccccagggctcggactcgggctcagccccagaagacgacgaactccgcttcgcccgaccccaggtctcggactcgggctcagccccggaagacgacgaactccgcatcgcccgaccccagggctcggactcagccctggcctcagccgacggtctctgcctcgcccaatccaggggctcggactcgacctcggcctcggaagacagactcgacctcgacctcggaggagcctccacctcgcccaacccagggctcggaccgaccacgtcacaggaggcgccatcattaccctacctcaagctaactcaggctacggggaacaagaccggcgtcccatctggctcgccccggtaaacaagtaatgatggcgccccacatgctctatgacgacggcggctctcagcccccttacggaagcaaggggacgtcagcaaggactcgacaaccccgacagctgtccttctgccaggctccagcgctcctccgacggccatgacaccacacaaaccgggtgccaaaacctctccggctgccacgatggcatgtactcagggcactagctcttctctgctagacacgttagcacattgctacaccccccattgtacacctggatcctctccttacgcctataaaaggaaggtccagggccctcttacagagggttggccgcgcggggaaggacgggacggcacgcgcttaggcctctcgctccctcccgcgcggacgcttgtaaccccctactgcaagcgcacccgacctgagcgcgggacaaacacgaaggccgcgggtttccccttttacgcctgtccccctccggcttcttcccccttcgcgctccgtctcgcgccgacccatctgggctggggcacgcggcgacaatttactcgtcggtccagaaaccctcgggttcgaaacgccgacaattatatttcggttttcggttaattcagttttttaatctagaacagaaagtatctcatttgttttggttttctgaaatatgaatcaaaatttataaggatgatttcggtttcgttttaagttaatttataaggattattttgtgagtcctattcaccgggcgacgaacacagatcaggtattctcttcctgccgtgcgagagataattgccattatggaagaagagagggggtttcgacgaaatggaggcgttggcgttggcttctctgttttggagacgcagctgacagacaaactctaaaatggatacaagacactcaattagggctgcacaacagatattagtgtcctttcaccatttaccgtcgccgagctcagacgtcgtttggcgtcgtcttcttctccgttgcggaatcagatctccttgagcatggccgccacgtccttcatcgtccggcggtcgtccggcgccgcgctcacgcacagcagcaccactcccatcacctgcagcatctcctccacctctgaactcgaccgtcgccggagcgccggatcgagcacgccggcgcggtccctgcaccgccgcacccagtccaccacgtgcaggccgtctgggatcgtcgggtcgatcggctgcttccccgtcagcacttccagcaccaccacgccatagcagcccttgccgatgatgttggcgtccaccaggctcctcaccacctggtccacggagaagctcagcttctggaacggcgtgaactgccacggccacgacagctcgccgccgctcttccccccaaagcccatccgccgctaggttcctggattggggaagcaggccgcaggaacaggaaacggcggctagggtttctagatgggaaagcagccagcgtcaacaagaaacagtggcgccaggtttttgacggcgtgagcacgaagtgaatttaatattgacgccagacgtaaatctctgtttgttgtccatatcagaaatagtctgtccgctgcgtctccaaaacagagaagccaacaccaacgccaccccttctgtcttcttccataatggcaattatctcgccgtgcgaacccctgcacccgaaccctcacttaaaaactagtccccttgcgaaaaaattggtccgtccctgcctcagtctgcactctacg

SEQ ID NO: 61 - DNA, 3000 bp, Zea mays
cgtcagaggtcagacctatctcatcatacaggaatgagggatcttaggtggtaagttttaaaattaaaattgtaaaaaaaatgatatcaatatatgcaaacgactagaaagtctcaagtaatttatagtttcacatttcccctcgtgaacaagaaagtcagaactcagatgctgaggacagcggttaaatatcgaaaaaaataagaaaccaatatcagatattaatcatcttaaaaatattatattgccattgattttaaaatctacaaaacatctttaatcttcttactcaactcagacaactgctaaattatttactttaacttaaaagaaacattattcataaatccaacggtttatataaatttattttatctatccgcatagaactatatcaataacttagattagaaaaggtacagtgtgaaaatgtatttattttattcatggaccaactcggtccggaccgacactagtcacgcaccgagtacgggccgtgataaatgctccactacccaacatgatccgacgtttcaacgagtagacgggacgcacccttgctcgctctcagaaaaaaaacaaatatgttattcagttttatgcttatcattgtgtccgatgttgtactggatatagcatcggataaatcaaatatgattttgttttggccaaataaatactccctgagtaaaagaaatctccctattggcataaaatattttctcctcttatccatcgagagggtttctctaatgaaagagtaccattttggaagactaacaaattttgaagatacttggtggtgcgatccttttgctttggtctaattatttctccccgtttggattaagcacaaaaaacatagtatatttgtatggccttttcatcacaaatatggaatttttaaaacttaggtttgagcaagggtgtttgccgaacgaatgtgcaacgaaagcactcccttttctcaacaatggataacggtctttacaatggatacgataataaagccaattgagttataccaagggatctttgatatcaattgagaatgcagtggaagcattttccttacacgtaaactatatatccctttcagtttgagactaagtacaaaatagacttaaaacaacactagtctcgaagatttaaagtgcaaatattgctccctctatattcatgcatacaggtgatgaatacttgtaaaacaatgcacgttggaatatgaggcatgggaatacaagatctacacattaaaccttggcagaaacaaaaaaagtatgaattaagaataagtatcgattgaaagagaaataaatgtttaaagacatgtcagtgaagcttattggaattctatgatatagattgctcctcttaaatatgtgtattaagggggtgtttgggatacctctaggttccaactccaatatgaaactgtagtttataacatcaatttaaatagttttaaaataattttaatataaataataaataaaattacttatccaaatgtcttttaaagatttacagcttcgactccatgattctctggagcacttaatgacctgctccaccagctctaccatttttcttgaagacaaaactgtcccaaacagggtctaagacgaatacaaatcttggtcttaaatgacaatggcacacaattaggtcaataggcgagaacatatttacattatagcaaccgtgaagagcagtgtgtcataaaatagccgtgatgctcgtgacataatatgcacctaagaaagtattgtaataatcatttaatgcatttgccctcagggctagcccctctaacctttttttggctcccaaactagtcattaaagattcaaatatatctaaggaacctccccttttagaataaaaagagcttattctcgttataaggttaagctttaaaatacatgtaataaaaatacttctctttgagattaaccaatcatagtaggaaaataatcttaaaaaaataatctgactaattgtgttcgtcacgggacggatacgagccatatttattgacaaaaaaattcgatccaacacgtcaaacacggaccaacccaacctaacacgacactaaacacgggtcagatacagaccacgttaaatataccatgacctgacatttgaacacgtatagttcttagcagcaagcaaacatcgcaatggaaataaaaaacgtaaatcccagcaaccaaataatcggtgttaatcattctactgtaacagattctggccgcaattatttccattgtcattccctaagctaaaccaaaaacacctatgatgtgtcaaaaaaaagttagaaaaaatacgaagaaaaaaggaatattatggacttttatttggtggcccatctaaaagcccattgattcgttccacgagacccacacgtttctttaccctagttttttttttcactgagcgaaggcacacagccgcagccccatcttcatcttcctcgcagcgccggcgttccatcttccgctcctcccttattcgcgctcggcacgcaggcggcggcggcggcactcaggctcgggatctcagcgacggcgctcaggctcgggatctcagcgacggcgcccaggctcgggatctcagcgacggcgtcagcggcttcccttcagcctcgcgccctcgccttcgatcctccgcacaccggccggtgaccctgcgtgcgtgcccctctctctctccgcccgcttccggtggatcgtcaacggcgcccgatccctgcgccgcgcgcagtgtgagggccgcgggagcgcgtatgccccaaagcgaagcgttacccgtcctcttggcgctccagcgcgctgaagcgtgcgcttagtgccgctttttagaatcctgacaacatttgcatatcatccttgcagggttatttctctgagggcactcatgatttagcacaagtcatactgatctctaactctggtgacataagctgttgttagggtagcaaatcaagagataaaa

SEQ ID NO: 62 - DNA, 1247 bp, Zea mays
ctgattgagtagggaggatcatgagtctcaggcttgagcaggagttgcgccttgcgttttaagttgttttagggtgaactctttattgagttagcattgtgcggatcatctttctttccatggatgttactttacacattgctttgtagctctctttgatgttaaacgttgttgtggcaacaacccgtaatgtcgttactatacgactatatatctgttgtaccatatcagatgcttcctcaggttctcagagttccgtaatattcttcggtttaggtttgttatattattttgtatcaatggtgtcataataaggacctgacaatgttagagatgagttttgaagatcaatagagttggtgtatcaatttagttactactactacaacaatgtcaatgctttcttctataaaatgttggagtacaaccataacatgaaaatgaatagctaaatcaataaatttaactaatctttttggccaatcttctgaagttgctttgaactcgggattccaaagtaatataatttatctaaactttgttgcgccttacctccgcaactgtagggttgtgttcattcagtcagagatggagtacaaaaccaagagtaatcraaagtaatataatttatctaaactttgttgcgccttacctccgcaactgtagaaacggttgtgttcattcagccagagatggagtacaaaaccaagagtatcttttttgtgctcacttaacatactatacgcataacgtagaagaaagagcagtagagaaatcataaaagtggcctacggcctctggcctacacactagtagcaagttatgagcaggctgctcaagtgctcatggattttaaaacagattgaagtagatgagctaagtattaaaaagataggttgtgttattatttgattagattttaagttatctttatatgacatgataataacataaagcccatgtattattaaactctctactgggcacacagcaggccagcagagcacagttatcacctcgggcgaacgggcggagacgtcgaaacgagacgcccaaaacccctcgcctttctctctctcccaccgccgtccgccaccaacaacttctcttcagatcccaatcccatccaacgtttggatcctctcctccagtgctcccctcacttctcgccgccgcccactgccgctccccccaccaatccacagcgagacacgcccgagcgagtgatccccgacccagccgccgcc

SEQ ID NO: 63 - DNA, 3000 bp, Zea mays
taattatgtgctaaagttcttgtggctaaagatcacgtacgtacgcacgcacggctcaattggcatatgcatactagcttgttggcactagcttgtctctcatacgacgtgccaaccagggttatcatgtcatggccagtgatcgatcgtagctcatgcgtgctcgggaactggatcgattgttcagcatttgcatatggtacgtaaaggctccttcgttctgaagctgctcatagctagaggctcggatcgagctggagtagaggcccggatcgagcgccgtgaagagagatagagagaactagagtctagagatgagctagcagggaatgaattgaatcgatgtgctcgatcggtttgcaaccacgcactggatcgacctgcacattcgaaagagctagctaccagctttatttgtccgatgcaagttgtttttgtaaagggatcacaaagagaaacaaactactagtttataaagtttctccaaacttgtttcctttttcttcgcctatcagatatcttcctctttggatacgttcctgatcgaatagagaggaacgtacgaacatgcatgtcttccgcctgttcctcttgcttgcttccttttttcttttgataatggaaaaaaaacatgttccagccatttgcatcaaggatgtatatggcttcatagcacaatcaacataaacaaactatagatgtccaaatgggcgggccgtgccggcccgacccgagcacggctagacccgacacggattaggactgtaccggcctggcatggattagctagcggaccgtgtcgtgccggcccacgggccccaaacgaggctcaagcacggcccgctaggttaattaccgtgccggccgtcccacggtccgacgggcctaacgggcccataacaatatacgacttttaaatgataaaaatatcctaaaagtatgtatttttagggtttaaaccatgtttattagatctaaacatttatttacacccacataaccaaaaaaacacatgtttcttgtgttttataccctatattcaagtataatatatgtatttatatgaaaaaatagaaaaaaaaataaattgggtcgtgtcgggtctagcccgtcgtgccacgccttcggcccaggcacggcccggtgatcggaccgggccggcacgggcccggttcactacgtgtcgtgtcgggtttgtgccgggccaaacccgtactgggtttcgggctgcccggcaagcccgatccgtttggacatctataaaacaaaccgactatagcaaaaacatcacatactcaacccaactaaaataaaaacatcaaaacacagtttctccttaacataaaaaaactaataagtctcaattctagcattgcatctccaaccatgtgttgcaaagatatccattgccaccacttccattacacaacaaacatcctttgatatctctgggtgtaaatcctcttttcgtagcaacctccaaaatctgagccagtaagatcccttgaaaatcacctgcatgattcaaggtatatgttctccattaaaaactatatcattgccacatatatagccagattgaccaaaacatggctgctacccctactaatttgcttgattcctatctttgattttagacctattaatctgtttgatgacgccaaatccatctacaagtgtcaaatactatagttattcctactggatccagaattttgcaatctagaactttatacccccgaatttaatttgaaacttttagctattatgtataaagctctgtattagagcatctccaaaagactatttatttgtggctctattattttactctatatttacctttttcatgaagattatactttatatgtagcatctccacttaaacagattatttatctagtttgactaaccaaatttggcttgtgaggaatccaatttagagagtcggatatatagtctattggatcggacaacgacacaatctctaaaatataactttgaccaatgtttttttgctaaaataaaaataaactcttaatatatttatacttttataaaagtactttttaatgataaatattaggatttaaaactaaataataaaaaaattatttatagttaaaattttataagtttaactcggaccttgtcgagaatatattatagatgtacttttatagatcttatcgtaataaacgcaatggtgcaaacacaataaaaaataggtatttttttaaataaaataatatacagcttggtgagactccaatgaaaaaacacatcaaaccatggtgcgggtaccttttacagccacacacaccacagaaacgttgaaaaggcgaggcagctcacgcgggtgcatgcacatccctcggttccgttaggccaagccaagtgcccttatcctcttctcgtttccagtagcctccccttatcacgccttgcctttcctgccttaaacaaaatcgtttttttctctatttagtactagtaataactgttagtacgtgtaaaaaataaaaggctgcaagttatatatgttgcccacctcgctcctctaattatccactgatccgcgaggcccaccgggcagccgtgagagattctcccgaaaatacccccccgtcgcgaacgggttatatatagcggggcgccgcacacccggcggagcacggcagtccgcaccgcacacacacgcacaggcagcagcacagcgatctgccttctgctgtgccccgcccccatccagcccagagcagcagcgcgcggtgccggccggcaaccgcagctggtcggtcatcaggtctctgggcctccacctcctccttccccctctcaaccctccccgtgtcgcctcctcccgaatcctcacacgtagccccgcgcgccacctcgctgccggccgccggcacacagatatagagagagagagagagagagagagagactgagagagagagagggaggggaagcgaagagaccagaacaagagcgaag

SEQ ID NO: 64 - DNA, 1782 bp, Zea mays
ctaataatgatgtaaaggctccgtgttacgagctttcgatcctgggttcgattttgattcatatatagggatttcctaccattcagggctagtttgagagtgttggataggctaaaatcatcttcttactcaaaatttaataaggagaggatttttagcccctccaatcccctccgattttgtgactcttaaactagccctcagtggatcggagagcatctcccctccctcatgtgacagtaaaaaaaaagagagagcggattagcatatagtcatccatagatttaaggatatagacacctttgttatctgtttaattaaatggatggaatgcactagtttttaatggatgggagtagatagaacgagaatatttcactaactgtatttatattatttaaaaataaagtatatatatatttattaagcaattatacattttatcatgataatctataattacaaataaatagttggcattataatcatcttaattagcaaaacatatgcaagttaatacatcacaatctatcttaattaatattcataaaacgattaagcaataatatatataacatatactggtaatgtttaattattttactaataacaaatattagaaaaaaatatagacgagctcacagaggtatccaacatctaacacctaagattatattccccgtatacgagcatatttatatccaggaaccaagcaccgcttattcgtgtcgtcgatcaagaatcaaagacagagagacgtgccgtcgttagtgccagtccgatcaggtgcccatggcatatagcaagagcgcctaatcgatgcaaaacaatgacgtgtccacccacaccacggacccggggctcatgcgtcttccttcgcaccgcaccctcgcgagccgcgacacagatgacaggatgccaccgagatcgtgcggggtcacggaccgtgagctctttggccgctgggaggtggaagcagtagacggcagagcgcagcgcaggtcagcagtgggcagtggcggaatccaactccaacacgtccgtccatgacaccatgcccgtcgcacgtcagtgtcagttgcgcaccagccacggcgggctagtgtggtgtggctcctgcctcgcgccgccctatcggccccgcgagtcatctcggacccacacgtcagggacagtccactcgttgcgttgcgtgggctagttggtggctcgctggattccagattcctcgtcggccagcagagccgggagtttgctggtgttttttaaccaccagattctctgcgccactcattttcatctgccccgatgagcctttcgcacttgtggacttgtctgcttcttccttttccccgtgagtgcgcgtgctgcatgcatgcacctgactgcctgcccgccccttggtgtccgtaaccaaagggggccgagggggcgacgtgacgtgaccaagggactgggttgcatttgcattggttgccaaatggaacgccaacatcatcagcagcacaggtcgccaaaatcaaaccacctctgcggctgtgaatgaacacacaaaccaagttaccaaactttacataaaaaaatagttagcacgattatgttgtactgtaaccagacccagtgcaccgcgatcgactgatgcgaccagaggagccgaagctttgggcgcgactataaaagcataagccagctcgcgcctcctccacaacccctgtgggaggagccagagccagagccagccagccagacacacaacctcggtcggcgcggcggctcaaccca

SEQ ID NO: 65 - DNA, 3000 bp, Zea mays
cgcctctcaagctccttgttcagctcagcctccttggcgcgccggagcttgtccttccggtagtcctcgtagtcgttgggcctggcagggtcgtactcctccagcacggtggactggacagcgacgaacgcgggctggaaggaggtggccggggcgggttcggcggcaacgacggggggagcggggatgtaggtggctttgggcgggcgcaggtgctggttccggagaatagatgggggtggggcgaaggtggtggacggcttgcggagggtgggaggcgccatcttggtggcgctggaccaaacggaagccgtggaggccttgtcttcatcgccggccgacgacggcggcgggaggtcgccgtacaggccgccgagcatcttgcccaatctagggtttggctgcttgagtgggggaggggatgcgattcggagaagtcggccccgttcgcttcgatacactttgtttattccaatttcaggtgggttaaagtgtattagaatgtattaggatgaattttgtattgctatgtatttaaactgacttaatatcactcagtccacatgaattaacggtaaaataaataaactttacaatgtgattgaagtaaagtatttcaaaactatagttttaaaatactacggctttaaaatatcatgacacaattgtaatattttttatattactcttagtaatatgtgtttggcgacagtatcttaaaccatgacccttggttcttttttatttgttacggtttagttcaaaaatgaaataacagacgacaaatattcgagaaaaagttaggtttatagtggaattttaaatatttcaaaaatattatgtagagtgtactagtaccggattgaaatttcgagggattgattaaaattcagaaaaaaagggaccggaaaggagatctgatagacaacaaatatcatgacataattgtaatatttttaaaatacacgctttaaaatatcattacacaattgtaatattttttacattacttttagcaatatgtgtttgacgacagtatcttaaaccatgacccttggttcttttttatttattgtggtttagtttaaaaatgaaataatagacaacaaattttgagaacgaagttagtatttagtaaaaaaaaagttaggtctgtagcggagttttaaatatttcaaaaatatcatgtagagtgtactagtaccggattgaaatttcgagagattgattagaattcagaaaaaaggactggaaaggagatctgatagaccacgtttttgggttttcaaggttgcaatgctggatgtagaggttgccgcggacgcggacgtctttctgcgcgtttttgtgtggccatgttttggggctcggttgcgtgccggaatcgaagagtgtactcctgtacagctgaagaagatgggcatgccactcattgcccgtgccatatctggagcagttgtcttccctatagagccaatcgcaagccttgctgccatggaagttgggaggggagcacgtgcccaggtgcccgtccaggatccaccacaaccgccagtgccttttacaggtcatgccgcggacggcactgcttcgccttgctgcagcttcgacgcgcgcgtcctcggctcccgcggcgcggcggctgtactcgtcctcacactcacacggacacggcagcgaggagcacgcgatcactcgggaggatgagcagcttccaccgccgccccacgggccggaccccggcgtgcggcggctgcctcgtcgccgtggagagcatcggtgagcatggatagatagtaagcttgcattcgagcacttctgcagttctgctcatgcgaatacccagtgtttcttttctgcacttcttctttccctcctcgccattgcgattgcgaccacattcgtcttcgtggtggccgcaattagggctccacgaaatactcgtggctcgataactcgctcgattcggttcgttttaattttgtagcgagcaagctagcattctagctcgtttctctaatgagccagctcgggtaagctcgtgagctagctcgtgagccaaacaagccaagccacaacacaagtttgtctagttattggtgtcatctcatctctcatagtcttgttttctcgtagttataatcttagatatggacatgtgtgaatgtgtcatatgctcttattgctatcttattataataagggtataaatctgtaagttaatacatatttggttatttaatttaatattaaaagtaagaacctagaacgatgatatgataataatattataaaggttttgggtgtgtagtgttaaacacttaaaatatgatttttcagttatatatatttatgtacatagatcttttatttagttgtgtagctcgcgagcctaacgagctgactcgagcttcctaacgagccgagtcgagccagatgtttagctcgttagtataacgagtcaagccgagctagcttattacagtaacgagacataagcctagccgcactcttcttctaatcaatcacaacacgacatatgcgtatgggcacaagcaagcaaatggcaaatccaatcattctattgtgatgggttgccagttgtcacgctatctctattatattactgcttggtccccgcggcaacggctccaacaactagggaaatcgacggtgaggatcgttccaccgcacatccaagccgacaacggcaacgccacccgcacgtcccgcgcggtccgtcggtcgcccccaggaaaccactgaagtttcagccccaaacagtccaatcacgctaattaattactttccccccaaaaaaaagccccccaccgcctcgacctcgattcctccgcccccatcgccgtcgtctcctcctccgcctccctgtctgtccgctccgcacctcccctaaaaaacccccccggccattgccgcaccgagctccccttcctcaaatgccccaggcccggacgcctcgacgcccagctccgtgctcgc

SEQ ID NO: 66 - DNA, 3000 bp, Zea mays
tttttaggaacagttttgccgcaaccttcttcaacacgtgcctggcttgtttcaagattacaaaaggatccttacgagtcgtcgtgttttcaatcacggcgagcctgattaagatggcatggtcaccgtctttgctggttttttatctaggaaaaagagaagagtaaaaaggcaactgttcctaagggctagtttctattttcccaacatattctcattttccctagaaaaataaactaattttccttagtaaaattaaaatctctcagaaaaattgcttgtcaaactagcactaacaaggtgaatgtttgtctagacgttataagggcatgtacaaccataagaacatgcccttaaaaatagttttaagagcattttttgtgttatctccaatagtacacctaaatgcaaacgtaaaattaaaacatgccatagtttatttggctcatatgtgttcacgtgcaacaaaaacaagccattttttgtgctaaaaccgtctgtgaattatctctaccgcgtctctgcgtcagacttttgtgctaaaaccgtctgtgaattatctctaccgcgtctctgcgccagacatagggcctgtttggttcagtttttttctgaccagcttttctgagaatctgactgtgtagaaaatctgagtatcattaggattacgtgcggaggaagataaagttgttcatggggcttaggatctataaagtgacggattactgctattgcgacgactcaaccgattatatatttatattgattttgaatggtttttacccaaatgaattttatagaagctgactaaaaagctgagtgtttggcagtctgcagcagcttttggtggctagaagctgcaaaaagcccaaacaaacatgggcatagctctcctcgattcgttggggggtaatcaggtaagcaaattttgctttaataattcaagtatgttgattacgcagtgagttgaaaaatatttttttatcacccgtagagatggcaatgagtatatacacgttggtagtatcatttcattctcgtacccattagaaaaaattatacacgatcacgggtacaaaatcttactagtacccgtactcgtacccgcgcgattaattttactcgttggataacatgtacccactaagaaggtctcaaatcctaatactccaatcactcaaaatgtcaaataaatacacaaaaaataatttcaacgtgaaatataacaaaccatatgattatataacttgatagttaaataaacaatagctgaagaaaagttttattttaactaagatgaactttcttagatgataacagtggtattatacgggtacattttacccacgggtatacggatataggtagtatccacccatatatactcgtacccgtgtacccaacgggtagaagttgttgttcattaacgtacccgcgtgtatagaaatcattccatagccacctacatatcgggtaaaacctatcgggtattcggatacccgttgccttcacctgtactttctagtcgatagttcgtcaaattaaaatgtgtcgtcgcattgagaacacaccaaacgaaaaaacgacggatgggcctgccagagacttgctgggttggcaggacacgtttgggaaccaaaacgtcccctttttgtaactacaaaatggaaaatttctggggctatgaaaaagttgggaaaggtttaagagctctgttggaggcttgatttttcctatttgtctttaactctaagttaggagacattttaagagacctcttgtatatgctctaaggctgctagatcgtttttcatgtataaaagatagctaaaagattgtatgatacaattatgagcttatagtcataaatatagttaagagacaatatacgtagagagttgtgtagagactggttctccgtgaaagatcgtctcttatactatttttttagccccctcaagagacctacattaaatagggttgaccctagttagtgtgggttctctaggggtttgttggaataaaatacaaatagacggattcttcgtgaagagtgtgtctccatacgattctttatatttattgtctcttaattgtatttatgatctagagacttagaattatagctctctcttgtatgcttagaaaatcgaaccctagtttcagggtggtacatgccatatatgtctttgtttttatctgtttctcttattagtaggtgaggcttcccatggcatgtcatatattagatgatataactaataattcattccaaaaagaccatcatagagtgagtaagagagagacggagagagtaaagaaataaattccaaaaagagagggagaggatgagggcaagagtggcccatgtgtaggcccataacgaaaagcactaataaaagcggaaagctccttttgccggcctccattacttttctagcccagacctgtccacctccacaggggcatcaatgcacctcctgctcaccgacatgcgggacaccagcgctaccggccccacctgacatggacacgcgctttcccgtggatgctaatttctccagcccgggatgctgcgtgccaccacagggtgatttggcgcgcgcgggccccacgccgggcgaactcgtggcccaggattgccctcgggccggtcgcggggaaccggccgagccgagccgagcccccgtaaagtaaagtatgtaaaccactggcgcctcgtttgttaaaaacaccccttggttgttccatatctctaacagatccacagctctcctagtttgtttgcagtgtgcgcaccagcactgaacgttgggatggccatgcatcacagccgttgatttttgcagctaagcaaggtacactacatacataggacgagtatgcaattagtggaatagtagatgggtgtgattgcacggacgcgtgcaacaaattgggcaaatctttttcccctttcaggcgtcgccaactccacttgtcagatcttgcccgtatggt

SEQ ID NO: 67 - DNA, 3000 bp, Zea mays
catggtgagtagtgtcggtgtagcatgtagcatgggttgacattcaagccgatggactaacaacctactcgttagcccctttatccatgttagaaatattgtcatagagatcatttcaaaagactaaattttttgaatagaattgatctggttgttctttcttctagactcagtgtagaaatgaacttgtttatgagatgttacatggatcactcagtgtcatacattcttatttctaatcaaaatttaagtactagtctcatgctcatttcatattcttaacaaacatcatgcttttatgcaaagtataaatacctaccaatcctattggcatccaccaaattttatgttggaatacgttatttaagaataattatactcacaaaactaccattaagctattacacgtacttcatacttggtgaacgtccaagccaagctttggtgaagctcaagattactaaacaatgggatgggctttccctatgagctatagttactctaatgatcaatactagatactaagagaaaactagtgcaaagggttattagtataaacatgtttacttgcaaccttaattattatttacacttcttacaacccaatgcaacttgttaaagtatttatgactatatgataaatggttacatggatcttaatggttggtttgtgtctataactatataaatgatcatgcaattatttctcatgtgataggagtatgtgatagcaactttgtggacacatgcattgacctaagtatgcaccacgtcgtccaagagaatgacacgaggtgctagcctaatgggccatgatagaacccttgtggtagctattcgtcaacaaattcattaagggagtgacctataatgtgatagatagagcatctagtgagatgtgcctaatacccagatgaagtttatcatattgacaacctattctatgtaatagtagatcttgtgaagtatgatgctaaaaaaatctagtgttagattatgaggaaagtccctaaacaaggtccatattgtgtaagatgtatgcctttccttttcataaggcagactgattttcaccttaacgttttccaagtggcttgttgaagtaaagatgtcctacatgacaactcttgataaatatacctatatgagttggactgctagtcatagattatatgatttaggtggtctataggtacatgaaaggttcaggagtttcacttctatgcttcaactagaagggatgctttatccaacctagtatcaataaagaacttatttgaattttattttgcacaaaagtgtcaattcaaggcatagtttgttatttagttgtgatgaagtgtaatctctaactaagttgacgttcaacttaactatctccatcggaacactggtatatcaaacaatagtgaatcgagaacatttcatatgtgctcagaaatttggtgagattatgagatttaatataggtttggctcatatttttaatgttgtggtgcaatattgttttagtcctatatgggattttgactaattattgactcaacttaaatgtatggactatgtatgcacctattgtgaagttaagagggattaaggcatgtcacacgcgtgtaccgtggccaagccgtggcatggcgagacgctatgtgatgtgcataggatcagggcatgccacttcccaataacatacagaggaaatatctgccacaatctttatccattattccatcgctcaaagtctctgctacgatttccacctctttggccatgatcaccgtatgttaagtgtggagtgtcgaacaattcttgggtacgaggcacataaggcactctctctctatctatctctcctctattgagtacctttctaattactttcattttggtcctctgcatgcactgaggattagaagagcaggtctctaaaacaatgcttgcatctccatcacttgctctagtgtgtcgggggatcaggtttttgtggacatcttgtataactacccaattttgttcctgtcgactacatcatcttccttctggtggatctttgagggactatactgcaaatttgcattgattatggtccgtgacttcgagtaatacactaggtcaactagtgcatatggagacatcggtgtctaaagcacaaggccctatgatgcgtatatctctaattttactgtacaaaaatttagtaagatattcgtgccctctaacctttcgtatgttcgtcatgattgccactgtaatgatcaaattatactttacatatgcacatatatgttgtcataaatttactactatttttatggattaaattaataataaaatatcaattttactatcggtaacaacctatgagttagaccaaaccagctaatagctagcaagctaactattaacacgaaatatatatgaactaggcacgaaatatatatgaactaggcctaaaataatactcactccgttccgatttataattcgtttaactttttatcccaagtttgatcggtttgtcttattcaaaaaaattcataattattgtttaatatactccaagtatgtcttttaaaattccttccatttttcataaaatttttgaataagaccagccggtcaaacttgtcaaaaaaggtgaaacggattataaattggtacagacattttagagtaaatagtattgcaagggcagccaccagccaataatcacaaaatcaacattattttcgtggcgttgagcaattcaacacaaagtaccaagcgttagggtgctggtctgctgggtgtagaaaaacctatggcgcacactgactttgaggcgccatgtcacgctggagcacccgcgcccgtgtgtgtatatatacatacgcctgtcgtactgccttccacagacaataataccgagccctctcttccattccagccttcccaggccagctgcaactactggctcatcaccagaaaccagaacgtacgccggcaacccatctccctgaa

SEQ ID NO: 68 - DNA, 3000 bp, Zea mays
gttgcatagaatctgtcagccagccatggctagctaacgaggaggcaccagaccgacagtctagtctgcaccggattggtccggtgtgacacagaaagtgttgctttcctccaactgctacatttggataggggctctataaataccccttagccgaccatttgaaggtgtggagagttggacaaccttgctattgagttgatacacatatccattgctccatacacccaagtgcttaatagaatcactcagtgattagcataggtgctttgtgaagtgcttaggttagttagaccgctattacgcttgctctaggtttgttcctagttgattgagtgaggttagaaaaccccacaaacccctcatcccttgtgcaagccatgtaatattgtactaagtggggcgtaccacatcgatcgatttgtggtgtggtcgccaacgtgtactggagggaacgaggcccgcagcgtttcaggtggaagctcgataatgaagacggcgagaagcgtccgggaggaggccgaaagcggagcatcacttgagcgtggagaagacctatgactctctatggagttactcgaccggacaattggccctcatgtgggcttccctttgtgtagggcaccaacgagaattagttagaaccttgcgtggttttagataccttagtaaaatatcaacacatttatgggagtttgctttctctacacttgtatttaagcttccgcatttattgtttacttaagttgcaatctctctattcctaatttagaatataggattgaaacttagattgctaaactccttttgtggtagagatagcaacacttacacaaaacctagtttgcacattatttcttagtattttggataggttttgtttagtagaattatttgtggcctagattagcgagaaaaaatacaaatcctaatttaccccctcccctaggcacatgtagtcctttcagaaattaaaccttcctagttctatatgtagatgacattctactcactacctttagaatatggtgctagcaacaaagaagtttctttcctcttttttgatgtgaaagacatgggagaaacctcctatgtagtaggaatagaaatccatatagatgaaaacaaggtatattaggactacttcaatagaaagcatacataaaagatgcactaaagatgtacgatgtgcgcaagtgtagaccctcgtatacgctaatatttaagggtgataagtatcttgagaatcaatatgagaaagatcaaatgaagttaggtcatttctaaacctctaaaactaatagttaacaactaaaattatcttgaaggtttagaacgggtcaactaatagacccactaattattacttatatctctcgaacaagtattagttgttagctgctccaaccctactaaaaccagctaataacttattagctaactaaaaattagttctagaggtttgaaataggaccttagtaccataagcattatgtatgcttaaatttatacttgttttgacttagcatttacaaccaagatgcttggtagatatcaagttaattcaggcataaagcacgagaaaacggttaagaatgctcttagatatttgcaagcagggctgtacctgtgggggtgccgaaggtgcggccgcgccgggctcccaaaatcagaggaccccctagccactagacgctagcacctttttctgttaaaactatctattctagacacaaatacgcaaagagcgatgcgctatcaaccagtcttgtttagattgttaaactaatgtctcaattgcttatcgaatactccatccgtttcaaaatagtatttgttttagctcttgatttttattttatattcaactagatgatgataaattcaccaaagaagcaaaacaaattttattttgatgtagagagagtattatttactatagacatgatggttgcattggcagagagaagctttttaaaattaaaatgtttttgtaaactatttatggtcaacaataacttaagagaggttaaatgacttagcgattctatatatcgaaaaaaagttgttggatgaaattgatctcaatgatataagcgagatgactttgtatcacaaaatgttagaagatatttttaacgttatcagataagaagtaagtgtttttggctatatttacatttgttatcttataaacatcaaaacagtgcataataatttttatacatcaaatattcgatattgtatgtataattatatatatatttgtgtgtggatgggccctccatttcgaatttcgcactgggtccctgaaaagtcaggaacgaccctgttgcaagaaacatgctcgcatttagaagatctagtttccttaggattgttgggtattcaacggctgagcaactatatgggtagatttataatctcacagcctgatggaaaatggacatgaatagaagaaaggaggaaaggcaggagaaagtagtagtaagcaaaggcaaaggagaagctgtagtgttccacgtcgatgtcagcagtgaaggcgggctttgattgccaagtcagtggggtgagagggacccataggggcaaaatcgagataatagtggggagaatcaaaaaaccgcaccccggaggccacaaatcaagcttgtggctctcggccaccgcccgctcgcccacgtggcccccacccccgactccggctcccgctccttaaaactatccccaattccccgtccgctatcccgatcgatccatccatcgatcgcccacgcttccgtccatccagactccagagagataaaatctaattcctggacctggagtgcagaccgatcgccgccgccgccgcgttgtttcttgtctgctcagctgtggtgatggtgcggtaaaagaaggctgctccatcgctccaacaaaaaaaaaggttgggatcgcacgcggcaggcgacaagcagtttccaaagagaagggaagcctagaggaagggagctagag

SEQ ID NO: 69 - DNA, 3000 bp, Zea mays
gacggcatggtggctgaatcggctgatcgggcagaaagaggaggtcaatttcggttggccatttcctttcgtggagggcaggctctttgttcttactctcagtgctgggttggagggttaccatgtgagcgttgatgggcgacatgtcacttcgtttccttaccgcactgtaagtgcatatgtttctccacttcatgcactaataaaatgctggtcaatgcttgataattgccgtgcactatgtattgtagttagttcgaataaaataattagtggtttgggacaattgaggacttgaggttctcgctacttggcctacttgtccagttaatttatgtttattgtggcctttgcaggggtttgtgttggaggacgctacaggcctgtcactgaatggggacctagatgtgcattcagtgattgcagggtctttgcccactacacacccaagttttgtgccacagaattatctggagttttctactgtttggcaggctcctctgctgcctgatgagccagttgagattttcattggcattctgtcagcagccaatcattttgctgaacgtatgggtgtgaggaagacatggatgtctgttgtccacaagtcaccaaacatggtggctcgtttcttcgttgcactggtaaacactaacccgaaggcttagactacttgatttgttttgtgtgtttgtgctgaaggtgtttctcaactccagcatggcagaacggaagtgaatgcggagttgaagaaggaagctgaattttttcgggacattgtttttgtgcccttcctagacaactatgatcttgttgttatgaagactcttgcaatatgcgagtatggggtatggcagagaatttcttgttgtttgaactaaatcttctttggagtactgtagctgttgtatacaccccctcgacgcggcgctcggcctcctctctactggcacccgtccttgattggcggcggcacacaaaaaagagatattatctgcttgtactgcattttggaaatgtgattgttttctcctttctccagtaatatctctaccagatactccgcggcttgcttactgtcattctcatagagttcttcatcgagatttgaaatctcataatctattgatagatcggcgtactaatgcactgaagcttgcaaactttggtttagccagggtatttggaattcctgtccgtacatttactcatgaggtaaatttcttgtggtgtttattttagaaaggaagtttgatgcccttgtaggaagcaaatttatcttatgtggagttatcaaaactttggttccctgcaattttacatccgtacaagacagattattttttcatatattctaatatctgttgcagttactcatcttgtgtttatggaagtatttttttcaggtggtgacattatggtacagagctccagaaattcttctgggagaaagacagtattccatgccagttgatgtatggtctgtgtgatgtatctttgtagaaattgggaaccagaagccactgttccccgatgattctgagatcgacgaactatttaagatattcaggttccatcgctatgctgctactaaatttattatatttgcattttgtagactgtttgattatgttttgggtttcctactttcctaggtactgctgaagggtacttggtacaccaaatgaacaaagttggccaggagtcacctctttgcctgatttcaagtcggctttcccgaagtgccagtctcaggtacgaggcaatgacataagcatattttccaaatctcggagcttataatgccattgaaatgctctgtttcaacctttaatgcaggatcttgcagcagttgtcccaaatcttgaacccgctggtttggaccttctctctgtaagtcgtttggataatcgttgaccatataaatgttaaaaatgtggcatcatatgattttctgtagccaatttacgtatttattgctcatggtcagaaaatgcttcggtacgagccaagcaaaagaatcacagccaggcaggctcttgaacatgactacttcaaggaccttgagatggtacaatgacctgtgttgttcttagtgtttgcatctgtatgagttgaggtttgtttcattccttttatgaccaccgatctttctctgtctccctctctgatctgcatttttgtcttagagctggataatttggaatgtggtgtgttttgagatgcatgtattggataatgtcgaatagattaccaccctgtttttctctacatctccacagaagtctgatgctgaatcttttttaatgctccctctaggctctagcctatgtaacattggtcccttaaattttattataatcaattgtttttgtgcaactttttaagtaacagtaatcatgtgatattgctctttgagaattttcatatccagaagtgtgagaatcctaacaacaatgaaatatttctgagcaaatcttcatatatttcactgcattatgcatcctttgtcatgttggaaacttatatggcaccctttcaatgaataatactaaggcaagtatattttttaactaaatgatgcttagagtagcaaccaaatagattcctgatgattttacttattttgaaaagatttttaacccgttgcaacgcacgggcactcaactagtatatagataataaagtatagaggcacagatagagatatagagatagatatattctcaccacaatcactacagtacaacattcacgagtgaccgcggatgcactcgagaggacaaccgtaccacggcgccttgcagaacacttcccaagcccaaagccattacaccaaccactctcgggctctgctctatttatggaggagcagccagctacaggctacagccgtggcgaaagcacacacggatcaatcacactcactcgcggccattgtcctgcccgtgcgtgctctgccttttcaggcgatcgaccaaccaacttctcgtcactgcc

SEQ ID NO: 70 - DNA, 3000 bp, Zea mays
agctgaagcgaccatgattctccctcctcccgcgcaatcatggttcatgagcagccgggcatggcatggcatggcatggcatgcgccctccccccaaccgctaagaatgggactgcctcacggcatgtcgagagcgggggttcggcaatggcaaggggatcctaaggtagtagtagtgtcctgctatgggattctctctagtacagacacagtcggcagctcgtagccttctcccggccccgaatttacagaaacctcttttcgacccgacgagtttcggagctccggtcgctgtcgtggggcgattttgcgatctatttccggcgtgctccccacatggcttcccctctcactccctcgtgcagccatcacatcgtcgtcggtgcccggacgtgcacagctccatcctgttttttctttgtacttttgtttatctacagaataaagataagccgtttccttttctgagggacaaagagcgaaactactgaaatgcgtttttttgtggcaatgctaatttttgggatatataatattttctctgtttttttatttatcgtgttttagctcataataaactagcaacggcaaatattcaagaacggaggtattatgtattaaagtgttgtcccatatttataacctgatagataatgcattggacgtatccttgttggtacgtatatagcgagaaagtaagacaatctgcatctgttatctgtatttgcaattgcaagatagtaagtgagtaacacagtttaccttaccactgttaaggcgacaggcggtaaaagtgaaatcagaagccaacgacccaacactagcgatctgtcgcagcacagcacccaagctaagcacagcctgaccctctcgccagggtaaaaaaaaaaagagagagagagagaaactgacaatttctatcaggtctatgaagcctatggtgctggtaccggggggctctagcgtagaagaatgcttccaagagaaggcgaatcaggcaggatcatcgctaatggcagggccctggccgtgatctccgggtggccacaggccgctatagccagggccatccctcccatgtgcgcccttcacatggcgcggggacacgaaagggatggttcatcagggtcggcaaaactgttgctttttcgaaagcgtggagctatagctagccattagccaacccgcacgttacgatgttccaaaggcacgcagcagagcagagcatggcaggaaccaggaaaagctagcctcgacgaactcctgctgtgtcgcgtaaatgtgcgcgcgcgttctccgatccacctggagatcgcgtgtcctgagaaattaaggagaagcatatgaaactctcatgcttttgcctgcttaagcagctgcgttggtttggtccgccggcctggtgcatgtgcacgcggagaatttggtgcgtcaaaaccgttgctgtttgtgtctgcagtatgtgaaatggagagacgagggagggaggcgtgaacatgaagcgcgtcactcacgtcttggttggtgtccggagagaaaaaaacagacgtgtgtgctgcagctaaaagcagacagagaacatggcagggtgtctctgccattgttcatctggcagctccagcatccacgtctgagcagtctaagcagccccgggagactggccgagcacgacacgcgctgctgtagacacctgtccagaggccacatgcatatgcatggtgcgactcgatccgctgctcctcgcgtgagtcggatcagacgaaatcttggacttgcctgcacctagctgcaggcaggcttgtctgaagagctggttttttttaaaaaaaaaaaaaccatctctgcatcctccacctacgccctacctacgtggccatgtccgggcaggcagccgggctcatgcaagcatgtgagccctgccttatcgacactataatctcaactaatcattgggatgagcgatgtatcgcagggagcaccgaatatttggtaggagattgtagttgtttattatgcatctactgcctcaagattagtctgatcacttgggctataaacgttttttttttctctctctctcgatcgacgaatctatccggttcaaccgcgccctccctcagcttgcgagatccgtgagagcagccgaacgattaaaatcctttcagaaacagaatggctagcactgcacattttttagttgtcgatgcgggtaaaagcgcttataacttgaataacgcaagtttcgaatatctcagggagctttcaccaccgtccaccgtcgttggaaagggaagggcatccgatccccagagcatgcatgtgtgcggcgcttgaatgatttggttggttggcattcgccgtctcttttttttttttcttcttcgttgctagcattactctgtctacacgcaacatggattgcattgcatcatagagaaaatttataaaacaagcggatgcactgcacgcagtgacgcagtgaacgatatatctgttctaatttcttattccctttggcctagctattatacccgtactcttgggcccagacctctcccatggcttgcagtctcgcgagacggcgagagccatgtggggttatgcacgctgggcccgggcagcgccgggcctgtcctgtcctgtacacgcacgagcagttggcgtccgctacttgcgcgcgacgagcatgtgcgcctgattcgtatggggcaaccgccgtcgtgtagcggcgcgatcgtggtcggcgggggtgtagcgacgagcgcttctttctcgcccagcccccaccctcccctttatctcttttgtctccaattgcctgctgcccctccactccacgaaagttattaacgattccaactgccaggatcactgaccgttgctgggcgctggcctataagtacctggcctccgcgccccactcccttcacagccaagctagcaactctctcgagtcgattcctaagcagctagccagtgactcgatcttagcgtgctaca

SEQ ID NO: 71 - DNA, 3000 bp, Zea mays
cttgtgagacaaagtccatcgactcgacagagaaagcaacagtttggttttgatgggcagaacaaaagaaagctttactcgactgcggatggtgtctactaatcctgctcactttgcaactagagtgtgtaagattttaccttcggctgattgttttgtgtaagcaaagattgtactgaaactaaagaagttgtgtgagtcgactctatttaccctgttggcccactttttatgttgcagaaggttttcacatcacaatttgtaaatggtctaaatagtatacattcatttttaatggcagcagtcgtgcaacctgaatgtatgtcatgttccacaatttgtaaatgctagatttttcatttgttcaatatccggcacgtgcaaaactggaaaagaacattattctttagttctacttgtggttaaggtctcacactccacctacttttgtgctttaccacaatcaaattggaagaccccaatttggaccggacatgaagtatgaaaaaagtgtgcctggattttttcctatcgttggactgaatcacatgctgcatttagaataacctatttttcggtaataacaattctctatctgcttggtagcaagattcatagcattgtattccttagatgtttgataacctgaaatgaatgtttgccaatatttcctgtatgagagaaaaaaatcttcagaagaactgttaccgggttcagtgcttctgatttctgaatgaaggttaaactgtctgttttaaactaaaactttggtaagcttgattcattggactctagcaggtgcaatacagaactctagattggtgtcattatcatggagccacccagactaatatactcttatatgggtaccacttgctagctacctttggaccactaagcttgtatgcacacaaacaattgatactttattatgagttctcaatcctttgcatttgccttagtattcaaatgattgcaatagaaatgtattgaattatctttatggtactttattgtaaagatttggacgtgtttgaataattattccatttaaataagatttaactatgtgatatatagccgtagcgacgagctacccaactaagatcgactgcaaccgaggacaacccatccatctacgttcgcttggggacaatcgatattcacatttgtattcacaatctcaatgtatcttaataaaatgtattaatctcaatgtatgttaataaaatgtgttgattccgtagcaacgcacgggtatatacctagtatatatatatatatcttctttctctctaaaacattcactcctctatactttatttctcttcagtagcgttctctatatgccgtcttctagacgtaaatacttatagtagagacatattttgctatacgtatttatcgtacatttaaatatttggtacatattttagttctatgtaatctgatgtttaaagtataaaaatggatataggagagaagaaaaaaaatctctctatagaggatataaaaacgtactatgtgttcagagaatgtgttaaaagaacactgctaaagtatatagagaagcaaatgttttttttttctgtagataaggtagaggactatttagcgcctcccttgcagacggcctaagcgaaagagaaggatcacgtcaaaacgaacgtggctagaaagtagaaacacgcgcattgcgttaaagcgtgcgttcggctcgatgtgtcacagtgtttgcgcgcgcgccgttgcgcgtgagtgatcagtgtctgtctccaatgattgattccaccgaaatcttgacacgacacatgacaaccgaacccttacgtgggaaacaatgatccggcgacccgccggacagcgacgcaggacctgaacaaaatcatgagccgtgttaagctaagcccacgcaagcaaatctgcaacttcggtagcgtacggcgaaactagcccaagcgtgctcctgggttggctagtttgtatggcccgtttgcatggaggcctgcgatttttgcgatcgaatctccggtggcacgggacgacggcttgagccagtgggcactcgccggatttagagcagaagggccacgaacgccaccggatttgaacaggagggcggcggagctggtcgagctccacgccaccgagaaggggagccgtgccgccgagcaggagactcgcgtcgtccaggacggctaatcgagcaggagggtgagctttggaggttttgtatttaaacttgatttttgtaggttttgagctttcaaaaaatagcaccagaagctaggtgtttatttgggcttccagattttcgaaagcaaaagctctcgataggcccaaacagacagcttcttcttaaagtcttcgaaaatggcaaactgagttccaggcagctggagacggaaatagacgggtgaatatgagaaatgggatcgagacgcggttgcgaagtagtggagcagaacggccaaccaccgcgcgcctactctactcccctctcctccagtcctcttgtgaagtcagagcgatgactcgagtccccgcccgaactggtcgtctccttcgccgggctgcccccaccacgcgaaggccgggtttagcatcgccctgctttgtttagctgcggttataaccgccggacgccggtgatggccacgtaatccggtgtccgctcgttaaccacaaacgtccgagcgtcacctggcgtcggctgtctggccgcgcggactggagcaatcaaaatctctcggccggcccccatacgcgccgcggacacccacccaccaccaccacacgcagtgacgcagcccgcccctctctctctctctctcggttcctgcgcacgcacacacgcacgtttccagttcgaccgagccagagccccgccccgggcagtttccattcgctgtcgcgctcctcctcctcctcctgcacatcccctccccccgaattcgagccggaggaccgaagagtagatctgcgccgggcgaccagagg

SEQ ID NO: 72 - DNA, 3000 bp, Zea mays
aggagcaaaaagacgctttaaaggagtagaaatctggttgacgttttatttgcactacatcgtgaagatatactattataaaacaattttatatataaccaatattcaaaatcaaacatataaatatattattttcattttaaattataagatgttttgtttttaggtacataatttcttatgcacttgaatacactaaattaaattttgttttagataattaatagatttataaatatttgatgtatatgttttacatatatgtctagatttatcaccatccatttaaatatagatataaaaattaagaggttaaacggctactattttgagatagagtgagtatataataaaaataatatattaaaagaataaaacgtcttataacttgtaacggagagagtgatttgtaggttgattttgaaagtgttagtttaagaataaaaaatgttaacgggaggatcagagtaaatgataagctaccatctggaatttggctatcttggcgatggtttcacttgaagtagcagatacaactctagtaatcggcattctcaatttctcatgcacctaacctaaaagatcctgcaatcgattgggttcatgaaacaaggcaaagacgccgaaaacatccttttctcactaaagacgtagcactactagtctagtctgctgcaaataatatctcgcgatgaaagtggataatatatatttattacatattctctcctctgcgacaggctacatccacgccgcgtggaacacgtgagcaaagatccgctcgtcatcgctggctcattccgaggccatgttattttgttttctaggggtgtttgaatgtagacaataattagtgtcggagaaaagattctcagacctctaaggctcaccggtcagagaaagcacatcacttaactaacaaggaccacctatcaatagggaagtaaagaaatagtcttgtcagaaaaaagatcctcaggcccctaaagaacacgggacagatagagcataaggaccttcagactatcaaagaccactagtcagtaagagaataagggaatcttctatcctataaacgtctccccaaaataaacggcaccaaacccgaggtcgggcatggttgagctagagaggggaaccggacgaaccaaagggaagccatttaagtggattccttgcgtagctctaaactgacctgtcataagtggtcgaccacattaactacgtccgacactgagcagtacagaatcaatccgcctttcacccatgacctgcgaggctgcaacccctcggcctacgccacactcatgacctactaagattaggtctgagagtgcaagttatctacatggcctgcaacatgacgagccacgccgaggcccaggctacgaagtgcaggaattggagtggcgtagaggcagtatacagtaatgatggcaccaggacctataccgccgacaccatccattataatgagcgcgagcagagatgaacatacgaccaagacactatggacaacacagcattaccaggataaaacacccggttttactatagaatactaggtccttctccagaaagccaccggcggtcgacacctcttaaatctttaatagaaaaatgagtggttactctgctatctgattattgtagtcaaagtgaacatttccgcttgctttgttagacatgctgaatggaaatataagtataattcaagtctatcaatgcactaattgaatcctatcgtcacatggaacgacgttgctggaaaacatttcagttgtcctcgtgtgagtgttttttcctcgaaataaaacatttagagcatctctaactatttttttctaaaaaaatgccaaaaataatgtcttgccaaaacctggcagaccacaaccatttgggagagagaaaaaaaaacagtttactccaataattactaagttttggtttacaatagaatatgtgccgttcttttccgacgagcaaaactttgggaaaggattgaaatctgttgattggtttttcttgatattggttaaaaaaaattcgagacggtttgcagggtttctccgaaatgctatggtcctgattaaattttttataccagtgataattttttagtacaatgatagtatgaatatatactagccagaacttgcatctaaatctaagaccctgattgaaagtatcttagttttaagaaactatttttttatcttttagctagggaagaccaatttcttgattttttaaaaaattaagaatataaattaagttataaatgtatgtttgggaccggtttaatttttataaaccagttttttaaaactaggtgctttcaaacatggcctatggcctaagtcagagagagtccatcttcaaatgtttttcgggacttgatttgtaaccaaaatactccaaatttaaagacgtcgatgaattgaattccattttttgggtaatacatatgattttttccgccacggttggaaggtagaattttgcgcatatctccctccatcagtccctctattttttctgcagaaaagtgtagtaaagaaaggtaaacaagattctcgtcgatcagttaaacgcatctgaatctcggcgagtaaaacatttctatttctatccgcagttctagtagagctttcaactcgaagaacagcagctcggtagaactagaaccgtagaagtaaaaaacctctacgtgtatcacaatataaagaattcagcaagtttccaacagagataccataagaacgcacgcgagtggccagtgggaaccaggaaacaagtgagagggggaagctgcggccgacggccgagctcttgccgtccctatccacccctctcggctctcgccctcctctctgtctttcgctccgtccagccgccgcgtaaaatccgcggaaccagatgcccttatccgccctctgatcgaatccggccagaaaggccggttctttgtcgtcgtcctcggcatcgccggcgaccttg

SEQ ID NO: 73 - DNA, 3000 bp, Zea mays
ccatcgacgtatagtactctctctctctcttcctaaataaattaatttctagagtcattcttaaaccgagccttttgcagttacaacttaatttataaaaaagcatgggcgcacaatatacttatttagtgtcacatatatttatattttttcctataaatttggtctaacataaaaaatatcgacttaagacgactctagaaattggtttgttcatgtagtagtgtgacttttatttctttattattattattatattataagtaaatacatagttttttttgttttcttggacggccctgctccttccaggaataatacattccaagttataacgtatggtccaacgaggcacggttttttaaattgttagctaaatcattaactttaaatattttaaagtttgaaccggtatcaaattaaaaagaaaagtgctattcagttttcttggaatatccagcccttggcctttgaccagtagcccagtataggtaggtcagtttctacctcgattcgccatccaccaaagacatctccgtcatgggcccgtcgcgtgaggcgccacccgatgttgatccggatccggcgttgcgtcaggtcgtttggctgttctagggcatgtataagtataacccgcaaaattcttgataaatactgcctatgttcatcaactagttcatttttaaactaaacagtgacaaaaaaaatagaacagatggagtaagatataaaagacttgatgtattgtgttgtataaacgagtttcttaggtgtatctagtgcttgaagaaccgcaaacatagtatctaggttgtacatgtccttagaggtgtttgtttatcctaactaaatttagttcgtgtcacattaaatgtttaatattgtttatatttattaaaggcataattagatttaataaacttgtctcggcttttagtcttcatatatgaagttgattttataatcaagctataatttatttaactattttttaaacattagatacggtagagactaaattttacttcctccgtctcaaaatacaatacgttctagactaaccatagattcattaagaaacatgtgaatgcagtttgcgtgtatatctatgttttcattaacatttgaatgaatgtggacgagataaaagtgggttagaaaaaaaaactatattttggaacggaaagagtagttaggtcggatggaccaaacacaaccttagggcttacttcgttttgttggtaattcatgtggattgattgagattgagtcggtttaaatctatagcaaattaaaatacatctcaattctacctaatacactccaagtcgttagaatgagaagagacttttccaagagaatacattgcagcggggtcgcagtccatcgagtccatcgttttctcaaggcacgcggattctgcccacgtcgccgtcgcaagtcggaacgagccagcacaacaccgcgttgcttgtcgacttcaatcgagcgtggccgtcatcgttgcgtgagcctattatccatgatccatgcgtttgcagcggtagttgaccggttgctgtataggaaacccgattgggctaacaccagacgtctccgcgttctcatatacgtacagagaaatccaggttttttttagctcacaacagcgtgtgacctacgcggatcatatcagacaattcgtactacagcactcgggaaagctgcagatgggctagtacacaccttgcatccgctggtttccgtgcattttgaattaaaaaagagagagagaagaattaaacctgtgcctgtctgaacggcgacacagtagagcacattcgtgtcgtgtcgtgtagtgtatctctgctagtgaggagttcagcagagcccttgccaagaacatgcgattgtttgataggaattgcaaaaattaaatgccgaaggtgcatttgataagaaaccaagtgtattacgttataaacatcagggatcagaaaaacctacaattcatatctctcgcatactctcttctttcttcttctatctcagccgccgattgaccgccctacccgacggcgtagttgacaccatagccacacgacaccagctgggtcaaggggtccaagcctgcgctgcgcggccaagcttttgcccagaccatcattgctcctctcatctttagttggggaagtgggaaagtggcaatcatacggacccatcaaaagaggccccttcatctttggtggcctagctggattggatatttggacgagtgttcttcttggcttggccacccgcctactccgtcttcttcatacgagacaagccgtgcgcttcttcttggcctagcccttcgagcaggtgcgtgcgagcggcctcctcgccttcatgattccgtcctcgcatcgcatggccttctgcgtcagcagatgcctgacgggtggagatttgggagaatcccagtgattctgtgaatcctttttgttctctgcttcgtcggttcggggttttaaggtttttgcgctcaatttcttccctgcagttcactttgggcactaatggttgctgctgtctagtcactgaaactctactttgcggtaggttcgtttcagatatattttcttatagattctggcttccccattgctgtcttgaaaaatccaagtagttaatagcgaaattgagttcccctccaccgaatcgtgcagtattcttgaagaaatctagtcactatactgaaatgtctgtttctgcacttcttcatgttcatgcctaatatgctaatcgtaggtttcgttttttttaaaaaaaaggggaactgctaatcgtagacgtcattggagggattgtttctgattgtccatggttccttttgcacattgtttcagtctactactcatgcaagaagaatcgttcacacgctgaagaacaagaatcggtgtgtatttgcagggcaggagaggaggccactctgactgtcactctgagcttcgcgtcacctgagtactgacggacgac

SEQ ID NO: 74 - DNA, 3000 bp, Zea mays
tttgttctcttccaccataaccgaacaagttttaggggatgtttaagttttcatggaataatttttagtgtcttcattttagtctctattagtctctaaattgtcaaaaagttcatatatttttttaatttaaagactaaaatggaataaaatataggaacttaaaattagtcactagaaatcaaacacctattttaagtattatttagatactctcgtattcactcaatccaaatgtattaagattaataaaggtgtaaattaatttaagttctactctaatcatcttaatacatgtgggttatattaaatacgagagcaaggtctaaccgaaatcgatcaaaaacgtcattgattttgcccgaactgcgcagcggttgaacggtccatgactgttccacgtactcaccagcgcgcttgcccatgtgattccgttgcgaccggtcgctgtcccgaagttaatataagcccgcgcccggcctttccaccagccagcccagccgcgcgcatccatagtccgtagcatgcatccatgcacgcacaccgtcgctgtcgccgaccggtcgtcgatggagacgcaacgcggctgtcgtccccggccggccgggcgcgggggacagcagaactgcaggagggcaggcgcggcgtggaggtgagcagtcatgcatgaaggcctcgcggcgcgtagcactgcacggccggcgttcaattcgcgagtcacgacgacgactcacgtacggaaggtctcgcgcggcaccaccccagtacgcacgtacgaaaggtctgccgccgtgctgtccggcggtaggagcccaggacgggcttgccaacgaccgcgcgccgtgacgggtcggggcacgggcacgggcacgggcacggggtcaccgctctccggctattgattggccgctacccgggctgctacggcgggatggtgtatggaaccgtggtcgagttcgacttgactgcgtgcgtgggtgccgtgtcgcgtggcgggcgtagggtcgtatttttgtaatcgatcgctggtgcgtgcgcgcgtatccgtatgtacttggcctcccgtcaatgccgccctagtttggtttggtttggtttgttcgacggatgggccgtgctgcctgaagtgtgcccggcttctgcgcttgcattggtgggtgcccgggtgggtcccgctggcaccgcgcgcgtgattgatcgatcgaacgatgaacacttacgatctaggcatatatgtgtattttctttgtgatatatatatatatatatatatatatatatatatataataataataataataataataatgtgatctcgcttgacgcatgagactacgaatatatatagtatggacaaaatattagaccaactccagcagcactggctatcccactccgtatcccttttttacacggtcgcaggcaccgtttcgctctccagcagtctccgcatccctctccgcaaaacgcacggcctgtacctgcactccctatttccacgctttctctctcctccttgcagctctctgcgtgcgcgcgcgcctgctggcgggccccaggtgtcatagactgcatgcggagtgagatggggagtgttgttggaaacggagacggatacggagaggagagagaatctgttggccgcgcgttttagggatacggagagggagtctgctggagttgatcttatgaccagacgcacacggatgtgatggcctgagtgctctcaatgcatgggcgccctagcttgctagcgcgtcgtttctcgttaattagggcctggccttttggccggttacggacgaattattggctgcttgtcgcaatatagtagctaggtatgctctccgaccgagaagcaaatatcactggcgccgccgagttgagctgttgggtatcataacgctgacgtcgatcgcttgcccagatcgggcacacatctgtaggtgtagtggccgatccaatgagtgacgcggactgctggatcataatagcgttgcgtcccgatgcgcaaacgtgtgggggtgtgcggtgtgcatcgtataggcaaccatcacaccgcatgttggggcacaccgctggaataacgagcgacgccgacgacgcgcgcggggcgacccgatcgataggaggaagctcagtcgccgatcccgaggaagatgaaccgtacgtctgcttcccgagtccccgtaacgtaccgcgtacgtacctcacgtgtagcgccggggacctggactacacgaacgacgacgacctgctaggctgctatacgcactcgatgactcgatcgacgtgcagtggccgccggagagttcacgacggcgagagacgacagcacccagcgcacaccatgtgcccatggcgcgtcgccctgcttcgtgtttggagagtgcttcacatgatcggcgccaaatcgccaatcatgcacacacagctagctcgtactgtattcatcccgatagcacagtatttacaagcgcgggataggatgcgacaagtatcagatgtgtttgcatcgtcctaacggtgccattacgcgatatcaccatcgctgttgtaggctgtgtagctggtactgtaccagctacacatacactggttgttggggctgctacgtaccttttgaattgccagtttcccatttcacgacgtactgcagcctgcagatcacctacacgcaagctacgtacagccagtcagccacaggttggaggacgcatccgtgacgatcaggatcaagcacacagactccatcgcatggggcacacacaccacatgcaccaacacccacccaagaaactagaagcaggggaaacccactcgtcttgttggcctctccccactgcccagtgcccacacatatataacgggccggcgcatccactcgaaactcgatctccactgacaaacgaagctctcctcgccgcactcgcgcctgctcgaccgctccaacaagaccctctcgcgccaccgcagcagcgtcgtcgtcgctacgcgg

SEQ ID NO: 75 - DNA, 3000 bp, Zea mays
aacaaatgcaatagtgtctcacttctgcttgcatccaagtgttccatgtggcaatagaatgctgacaagtagcaatgcaacaaacaggacgtcaagtggctgcagacaattacctcgttgccgatcctagtcaaagggatcgtgactgcagaagacagtaagtgctcggtttcagactttgaggcgcaaccttcagtttcgcgtcagcttttgttatggctgtaacatttcacgcgaaacatacacccgatgcagctaggcttgcgatcgaatatggcgctgctgggatcatcgtgtccaaccacggcgcgcgccagctagattatgttcctgcgactatcagctgcctggaagaggtacgccgaccaaatccttctgtgattcagagcttcagagtcttcaggggggtaaaggcgaaaagcttgcttgtgcttcctggctttccatgttcctgtctgctgaggttttcactataaagtgcgacgtgaattcaggtcgtcagggaagcgaaaggccggctaccggtgttcctcgacggcggcgtccgccgtggcacggacgtcttcaaggccctggcgttgggagcttcaggagtgttcgtaaggacgacgacgacgacgcgcccactgcctgctaaaaacgctgctatttcgttcgagcccggcacctgacgctgttgcttggtgcgtgctgcagatcggccggcccgtgctgttctcgctggcggtggacggcgaggccggcgtgcggaaggtgctgcagatgctgagggacgagctggagctcaccatggcgctcagcggctgcacgtcgctgagggagataacccgcgcacacgtcatcaccgacagcgaccggatcggccgctcgcggctgtagaatcattgtgcagttcacctcaggaatgatgttggtctcgactgaactgtcctgattcgggatctatttgtagctcttgtgctctcattttacgttaggcaaataaggaagctgcgtgcgtatgtgtgactgctgctgacgtttgtttgcgccgctgtcgtggttgcctggttggcacttggcagtgttgattggcgttagtggttggtttgggtgaaaggagtttatgagatctggtgccggtttctaagatactagcccatcaacgtttgttcgtgtgttgcccgtgctaatgcttcgggaaaatataaaataaaataatatttattttaaaaataaaacgaaataaaagtttcctagtgttagcatccctagtataaattatataaaaaagatagtgaaatttaatatatcttgctggtattggtacaatactcgtgcgttgcgacgacagataaatattagataaaatatattatcgcataataacggcataaaaataagtaatatatattattattgatcttaatatctcataaattatttgacaacaagtgatacaaaactaagctcgtgatccggcctcgccatgtgcgatctccacaccacccgacatggtccccttcgcccatctactgttgtggccgatcctcctctaccctagttgtcctcttcctcggctattcttgctcttgccgaaggtgaaggcctatgtgctctatggtagtacggaagaatctagatagggagacagacaagaaagaaatggaaagttagaagttaacatatgaagacaacaacagataggaggaggaagcactcttactaattgcatggttgctttcgcatgcaaaagataagtattatcgggtgtagttgttaggcaagacgtggaggagaaaacagatatacatgtttagcgcgacgcacgaggtcgtttccaacagagcagtagagtgtattaaaacgatgttttgtactataatctacactatttagagtgaagattgaaataagcaataagatagtgctgggataggaaagctgactccaaactgtcgtggcgcagcggttctcgagaatgtgtttgacatcagcactcaaataacaaatgttttaaaaattttcagtgcaaatttcctactttataggatcgcccgtggacagccttccgcatatcttgatcgccttactgactactactgcgggagccgccgagccgggaagggatggcgaactcgtccccgatgggcgatagtctacagctacagagcgtcgaattccacagccgaacagcagggcgaacagttttgctacaaatttacttcgagcacaggtgcttttgtctgatactaagtctgaacacgcattattgcaggagatattttagaaagcctactgcactgtcactgtaggccactgctgatagatcagatattcagataccaatcacactatcctcgatttttcatatgcacgcagaagacgaaattggttgagtggttacaaaaaaaccaaacactttccagcatatgcatgcaagggacgaaattagttaccagttaccaacactttcagcatatgcacgcaagggacgagattgattacccattaccaaaccaacagtttccagttcagcggtaggaacaggccgtcacggcgtcatccgccaaaggacaatccatttgctcacacaggcacaaacgctgagcgcctgagcctgctctcgcggtctagtaagtccccttgttgatccctcctgcaaagaactcgaaaactgctgttttgttagtgctatttctcctctcctcagtttgatgggtctgtgtcgatttgttgaaacgatgcgtgatgtttaacttccatttgagttcatcttcatcaccatgtggtcatgtggagctcataagctgttttgatttgttgcttagtaccgatatttcgtattttatatatcgtttgatcttacatattccctcagttcgcctcagtgcagtttatgaattgccttcatccattgctcgtgttgtttttgcccttcttactaacagatatatatcaactattagacaatctttatttttctgaccttctgaatttcccccaaatttgggcagggag

SEQ ID NO: 76 - DNA, 3000 bp, Zea mays
gaaaatattagcttgccagtaggatgagagcagcatttcgtttttttattagccaactcaagtatcgattttgttttacaacgttctaccaccaagtgaaggctagatgaagtgttcatggatcaaatttgacgccagcgatcgacaacagggaagattccagttgagcacattaaaatgtatgtgttttcgtaggtacagaaatctatttgcccaggaatctcaatttatcattattgtttcagtgccaagtggttaatatatactatacgcaggaaggcagggtggactttgcagccgcatctgtttatcatactagctagcacctttcccagccacagcatcagatcagcaccaggctataataattaagaaaacagcttggcgatgtcgagcctccaagttgcagagcagaccattcagtcaccaaataaaaagtatcttttttttttgggtatcataaataacataataataagatttatatgacgcaaacgggtgaatactggtgaatgttccagacaagcatgtgccaactgcctcacaataattcagtaccaatcagaagaagaaaccgaccggccatgcagagtgcaaaatcgagcagatgaatgctttgcagtactagtcccgcggagcaggtataatgggattcgtcatcagggaggcactaatctcttcttgataaaaaaaaggcttaatcggctgcatctgtgattgttttaaggcgccctatttcttcagtctgaatgctcgaatggataataagtctgccgctggctatctaccgtctacctgtgtttagaaatcagaaccgaagtaccaccaacaccaataatgactgagagacagagtcagagagtgaaagatgtggagctctcggcttctggccctaaatccaaaccttgtgatttcttagtatcatataagctagatcatcaccggctatattaaaaggaaatgcagtgttgtgttttatccatacggaccacgcatccaagattccagtcaacgcgcagttgtcagcccatgggattcgaagttcctaacgataggcagacgtgtccaatgtcaacggtattggtaatacaacggcgtatagacatgacatgcttgcagggatgtactccatgtaccgagtagaaacacacatactcagactgacaggcccttaaaacagagaccctgttaattaatgaaaccagggtcagagaccccagcagcaaaaacagctcttcggaacaacaaggagcatctccacacagcaaaaacagcaaatgaccgaggatgcgaagtgggatttggctcccgcagatgcgacaggtgggcacagtttttgctgcttctgaacgcgccgaatagtctactgatctccagcaggccgtttagcggcgtcagcgggtgataaacaagtcggccgcggacggaccttaatcgctcgggtgggcgatcgtgatggcgatcctgactgcgtccgcgggagttgctctaacttgtactacgggagtaagtggcaacgttttacacttttcctattgctcttgtcaacagacaacacagctttgttcttgtccttctatataaaaaaacctataatttatttaatatgatttattatgccaacatttttttctcgtcatagtgtattaaggctgtaaacttttctttttctgatttcctaccaataattgctaacagatttggatcgcaagatgaaggtctgctggctgttaactagccatcctgaaatatagcagatctacagacactactgaggtgtttggttcgatgaatcactctattcaaaataaagtgatgcatcatgagtccattcctcaaatttggtgggataactccattccacgtattattactaaacaactaactatgatgaattagtactaaacaactaactatgataaataagttgctgatggattaattcactctatttcacaaaccaaacaaaaaagtgagaagtaataagacgatggactacctcattcctcaaaccaaacaccccatacatctccatctcatctcaccccgtccctgtgtcgtctagccatgcggctctctctctcgagtcttgtctgactgactctgatgttgttgtccagtcatacgatcatcgatacatgtcgtgaatcgaaaggaaactatagaaaaaagttttcagcctatagagattttttttgcacgattcgggactaccggggcccttttccctgtctctctctcgctattatctgagcttgcaggttccgtttctcagcacaataatattcggggttttttttcacacagaagtcctcttccatgacgtcgcctgtttgaatcttccccgttgacatcgctctacaatgatttcaaattattggtgcacatattagtactcggcagtctagcacagcggtaaaatggttcagcaagcggtatgtcatatagatactatagtattgacttcaatccatatgtgttgagctggattgaactgtattgaacttaatctacttgcgttaaggtgaattagagtgtaaattagtttaagttatactccaatccagctaaataaatgtggattgatgtcaatactaaagtaaccaaacaagggttttaggccttttgcatctggactaaaaaaatctttgttattacccctgcacactgaaacacgcacagtgaggcacagcgggtccagctggatctccagattccgcagcggccctgggatcctggccaccgtgggtgggcagattcacaaaagcaaaattagaagccgatccgttgtttgttttgccgaatcaaaactgcaatttgctcggcacatccagcgcccgcccgcccaaccacccacctcctataaatccgatcgacgccgctgcctgttcgtgtcccgtcctcgcatcccgcgccacaccctcccaatcccctccccctcgcgtatccacacttttcacacgcgacgccggagagacagagcgcgcgcgcgcccgaaag

SEQ ID NO: 77 - DNA, 3000 bp, Zea mays
ggaatagagcaaaaatgtggctaaaatgtggctaaaattgagagaggatacactctctctccaatggtgaaaccctagatccaaaatgtggctaaaattgagcaaaaatgaataaaaattgacattagcaacataaaccaacctttcttagcaatcttcttccaaaaaatgaagatcaaaacctctccccatgtattttgtgaattctggacctccaaaatcgcctccaatggaagttggctgcgagcatacagttcactgtcaggggaagaggggcatttataacagacacttcactggcggttgtctttaaaaaccgccagtgaaaattgatttccactggcggttgtctttaaaaaccgccagtggaaataggatgtttccactggcggttatcttaagataaccaccagtggaaatcaattttcactcgcggtttgtgtaacacaaccgccagtggaaacatcctatttccactggcggttgtgttaagataaccgccagtggaaataggtttccactggcggttttcaaagccgggcccacctgtttctttcactgacgtttgataacggaaaccgccagtgaaaagttgaacgtgccgcaggctttgagcttatttgtactagtgggcgacggtgtatgtgagcagcgccctgaagcgtcgttgagagacggcgagctggacgacgctataggccttctcgtggctgcgacgtatactggtggggttaggcgggcgaaaacgatcgcacctgcacccgcgcgctgccgccagctgctgcgcctatgcacgccatcgccatatatgtaaccgccagcgatgttggagctttgaagaagcgcacgccatgaattaatgacaccggtggccaatctgagctagccaaaccgccgccgccccgtcatcacgcgtgagagctccagctgggaccgccacagttgctaatccgggcatggcgttctcgatcctatctagtgtcatcacgggccgcgtgtgtgccagtgccagtgccagcccagcgagcgcgacgtgtgccggacgcaacaacttacccaaccggccgcgggcgtcgggtggaagtggatagatgcctctacgtactgagcgggtgacgacgaccgcggctttgcattgcccgcgtcgccgtcgggcttgatcggccacatcgatcggtcgacgcgcgcgccgtggtcctttgcgagcccgaccgcgactagatcgggcgacggcggaccctgtccagcggctcaactggtcatgcatggacatcatttatttgttcttgcggaatctgcttcttccagtgcaggatgttggattaacgtgggcttgacccaaattaatattcaataatagtcaatgctaatggcccactttaatgctatggtgtactaattatttagtaccatattggaagttcaaaggacaaatcgatcaacttaaataggtggaccattggtgcatctattgagaagttgagaaaaggatgaatgactgccacacgcgcgcgcgccgccgccgcccgggccgtgccgtggtagatcggaccttggtccgaatatttctttcaaacggttgcgcattttgcctggagtgatgaccgtcatgataaccgtctgtttcctagtaagtttccagctctaatgcgcgaccgtttctgtccgttgtccttctcccttcttctgaccgcctataagaatggagagggagggctcttccagttacgcgaatcatctcacgcgaattgcaaacaacacattcccgtcccatcttctgcgagcacagagagtgggagagcaggtctccgaaatcaccgaccgcagagatacacttgcacgggtgtgcgggcgatcagatttttggggagcgtcttcgtgactgctcgcgtgatctgtttgtccagctgcttcgttcgacgtcttcccgagttgacgcgtcctgctgctcttcttcccggcgaccgttcgagagactgcacagcgtacatcttcctgcaccgacttcgtacggctacatcgaacaaacacacgagatgtctctccgctgggtacactctgttcttcgtatttgtgcatgtttcattgctgtttactgcttatgcgagtagttatacacacatgcacatacatgtcatcacatatatcgcactgattttctggattaaattaaaactaaaaatgcctaactttctaacataggatgcttcgatgcccatagcccatggcgatcagatccgctcgttaagaatgtttgccagcagcgtatggtgacagccggggccggcgtccaggaaacggaaggcgatcaggcggttggtttctacgtgcccatcatctcgaaaggaagccccagaacgcggaccggaggaacaagaggcgcaggttcgtccacggcgcgcctttgcctcttggggccagcatgccgaaccagtagctgcagactctcgtggccgtatcctccgaaaatctccacgcacacatgcattgtgcagtagtgcagagtagctagagaatccgaacgcacgatatactgatgatctgaggagcacgaatccagcgatcaacgtacgcgcaggagagggtccgtccgtctgctcgagtaggcgtcgagttcgatcgatccggcggcacacgcgcgcgcctaggaggagagtacaccgactaccacacgtacgataatgaacagagaacagttggtgccaaggccagttaggtcaataatacacaaaccgaaggtcagtttcgtaacttggctggtgcaggacagcaggagcaggacggcacggcagacaagtgtaagtcgtgtagatatttattacccgctctcggtgtgtgatgcagggggcgatcccgagcgagtggagctcttgcgtcttgccactttgccagttgccacgctccgggctcctcggcaaacacacagcaccagctaagctagctcacgcccgccgaggccatatccttcccagcacgccgtagacgccgacgcttgacgcc

SEQ ID NO: 78 - DNA, 3000 bp, Zea mays
taatttgacgggacctaataggtttccctagacttgtttatcccacaccttgtttaccactaaacttttgggtagttttgctattgctctacctgattttgggattaatattacattatgaccatgttccagttatactattgttttaattattgttcatgacaagatcattgtgataattggaatatggagcttaacttgagatatccgtgccactacaagggtggaatgggacgcccttggctgactaattaggagagctagtggaggactaccttacccaaaaggggcaagggcagtaggggagttgtcggtatagggaggttctcgggtcgatcatgctgtgatggcttttcggatgagggattcctatcttgcgctccatagaaactgtagcgggttttctgaagctagtggaactttgtaaaggcctcgtagttgatccctagccattcacctcagaagtgtctaagggtccagctaaccctagctgacgggatacacgacttgtaggtaaagggcgcaacctctgcagagtgtaaaactggtatgtcagccgtgctcacgagtcacggtcatgaacagctcaggactctcgcatgattaatttatggaactaaacttaatctatcatatgtattgcatcgcgggtgttattattaattttgatctcttacttaattgggttagtatctacttatacttagtaactgctaataaaattttgactaactttaaaagcaatgctcagctttaaccatatccttttgtaagccttatacttcacatgagctcccacctttggtgacttcatgcacattattctccacaacatgttgagtaatcaatgtatgtgagctcacccttattgtactcacatcccccaggtcaaggacaggtaccacaggatgaggtgcgtgaaggatactgtgatgagtacgtgagtggtctagaccgtcgtctcccaatcaactatggttgctggatcgatgtcttcgtatgatgtaaatatttattttgtatagaactcctattatatagtaaagatgtgacatttgtttttgtatcatgagtcatcatacgtgtaagacttgatcatagcacacttagtaattatttcgtgcctagtttttggaccctaaaatccggtgtgacaaatttctataaacgcgacgttcgttttgtatttatagtacctcgccatagaatcgttttgcatgcattcactgtctactgttttgttattattaatttgacattaaattctaatctttgtttggaaacacgggcttcatcaaattctatatattttctcagggaaaaaaactacttgatcaaggtcctaactgacccatagcgactgtttaaaacgtacaagtatacgatcgatgaataataacggtcgtagttccatcattctctctctcgattacaaccgcgctcaaacacaaattattcgagagaaacatgtccagtccagatgcaactagattatgcctggacggctgggccaggcccactcagccacattgcttcgtcggatggaatgaagcccgaggcccagccatcccctcctccttcccaggccgctcgcagagtcgcagtcgcacacggagagacgtggcaacaaagaggtcgacgaacgagacagagagccgttcctctcaccgcgccgaccccgaccagctcgcgagcctggggaaagaaaaacgtgtccaaaaacaacggcgttcccctgcgtgcgttccaccgttacacggcgcctccacgtcgcgtcgcgggatattcccgaatcccgtcggctcctcgcctgccgccgtgccgcgggcgcgcctcacctactccccggtccaaacacccggcgcaccagggccgccactcgcacagccgcaacttcccaaaaacaatctaggcgctcgcgtccgtacccccatagaccgggtccacgcgcgcacgggcgggcgggaatccccctccgttgtttcctaggccgcaccgcagtcgccctcgccgcctccgtctccgtcggttcgtcgggcgcaatagaaaaactaccgaacgcgccgccgctcctgccccgtatctataccaccgaaggcgaggaaggggggccaaggacgagcgctttttcgtgcccgctggccattgccgctgctcacgagcctcccgccccgcgctgccctgccctctgcggctctgccccaacgagccccaggagagccaggtaaaggagccgtcaaaagcccccgccgaggagagcacgcaagggtaagcccacctaccaacgaagccccatctcttcgccttgcccttctccttcgattagattggatcccggccgccgtcgctgcaggtgggatctgcttttttttttcttcttcctcttcgccgctccttccctcgggccgtgtgtagatctgcacgttccctggcttctgctcggtttcatgccttcattcatctccgtcgaattcccagtagatactacgttccatactctgtacggttatcggattatgcaggcaatttgatctagctgggtaggtcgataggttagttatggcaaataggaatgttggcctcattttctcaagagttggcaagtcaggcaatagacctacgcctgctctgagttctgtccatatatactccatgaatgaactcagcaattctgttgaacgattcgcgttgttatatactgcgtgccagaccgactcacgaacatttttttcatatattaatgcactgttactcaaggtcgtgatggatctgatattccgactcccagtattcgtgcgtgtccctagttaatctattgatgcttggaagaaagctctttttaactcctgttctatatcgatcacctggtggtgatacatgtttcattcttggttattactgcttctaaatccgattctttaagctaccgctctgtctataatctgttacctcacctgagtatcgtacctgatggttttttttttttggctgcagtcagac

SEQ ID NO: 79 - DNA, 3000 bp, Zea mays
ttgtagttggggatgctaaattgcgcaaaaaatgtgtaaagtggggggaattgataacaatacaaagtcttttagtccactttgtatcgttttatttattaaaatatttattttatcttattgtcattgtgtttcacttattaaaacatttgtcatatctctaattatttgcaaaaaacatgcaaaaaacatgtcttcaagagaaatcgaactcacaacctacaccttccaccaaagtaatactcactaaccaaatgaaccttattgatgtgtacatttagttgttacactcaatttttgttatagaatcctgcgaaacgataaatctctctaaacctctacaagcaagcctctccagattgatgtacgtgtgcccaccgccgccccaggtccgccctcagtctgcgcgccaaagagccatgcccgagcacctgcctacctccacccacgccaacgtcctcgctggccgcagcccctaggtcttcccacggctactatttttaactgaggctactattttttcaccttataaatccaccatcgtggctggaaataaatccaaaattcccgataccacatacattgtatgaaatataaaaaatgaaatgaatgatttaagaagcaagttcgagcaaactatttgttgatgtgctataatatttttcattttcccttctttgaaaggtgatatttgcacatcacttctctactttgcattacttatttctttcatttggtatatatatatatatatatattaacctattatattttttgggcttcgttttttcagttatgaacttggaacactatgaagatgcaagggcttactgcatatgcatatttgttttatttagatctagattaccgatgactatgagtcatatgtaaatatgtttttatcgtaccactcaaacatatattatatatgaaactatggatcaacttcttgtaatgcaattattgatttttaatatatattatttttttcttctttgccatgtgtgtggggatgattctagaaatatcaaatgtgcattgttcaacatgttatactcttaacctcaaaataaaatattcaaatatttatttattggtttattgtttgcaacgcataaaaatgttgccacaacatgaatctaaacgttgtagcatcctatgatggcgagatagtcacgggcggcaccaacacatgtaagcgttgttgtatcttataaaaatctgttgcagtttaccaacacttatttatatgacttaccaacgtatgtataagcgttgcagtagcccacagcaacgacagtataggcaacacataattatgtgttggtatagaccatatcaacgcttatataggcttgtaccaacacatatatgcattgctaaagggggggtcattttgtagtgtcaacaacaccatagataattagataatatagcaacattagggtagtactatataacacattacatgttttattatatggtcatcaaatagttgttaagcattatatggcattatcgtcgaaaagttgttaaatagtcagaagatatgatgattgaagccaagttcatgcttttgcactaagtttatactgggtatttgatagccacgtgttaacgagtatcgatgagggcgaaacgttctaaaactcgtatacacattgggtgaaggtttttacccaataagagacccgtggataaaatatttagcccatatacataccctaatgaagaaatacccatcaaatatcggatcgtgggtatccattgccatgtgtactccaaccaaacaactgcaggcaacatacagggcaagtgtccggtcgaggtaattttagccagcgtggtatacaaatagcccctcaacactcagaccgctgcacgtcacactagagctggacaaaaaaactcgaaacttgaccctggaatacctaaacccgaatccgaaatacccgaaacccgaatttggttcggtaatttctgatagcaacttataaaacctgatatttttggtttttttttacttccctaatgtagcttaagaccgatagtattgtccttcatacaaaaaatccctaactgagctctggaaggaggaccctactaatccgatgtgggtagaagacttggcaacgatttgtctcgggataaaagtgcaatggttcaccaacttgtacaatcctatctataggatgccatgccaaccagatgtgctagcggcgagctcctaaaatcagatgagaatagtatggaagggagctattcccgttttgtgatctggagtgtatacaagacgacgccataagcatgcattatttgtgtacatactagcttgtcttttttatcaagattgttgtgtattacatctgcacactctattcgccctgcccttgcattgcactgccactaccgcacttcaagcacactagcacaggcagagagaggcagggtaaacaactgccctgctattttttttttccttcgctagaatgaggacagccgccgcacttcgagaggcaacataaaaaaagtgactgacgtccactgaaactaacggccgcgcacgccgatcgggttgcgccggccgatgtctccggcgccaccacgggcatgccatggcgttcagccgttcacaccctgttcctttgggcccaaagctacctcaccacatcgaccaccgggcggggaaggctacccctacccaccagcgcgcaccgagccggctgagacgtgtggcggagcttgcgcgacgccactggcggaggcgccctcgcgctgccacgcgcccacgccgcgtgacggtgcgcggctagtgctcgccgcaccggtcgtcccgggccatcacgaggtcgccgcacctacacgctcgacgacactatataagaagcggccagcccacacagctgcgcaccgatcacaaaaccaatcgcggagattcaatcacgtacgtatacacacggccacacgggcacgtagctagctagcagtcgtagcgtgacg

SEQ ID NO: 80 - DNA, 2421 bp, Zea mays
atggcgttgcttcataaggatcacaaacatctttgtctcaccgtttgaagcaaacacaaatcgagcctgtgacttgtgccattttaccatatatgagttcaaatcatggcttcaagtcaccttactgatgcatcaacatgttgtaactcttcatagctgattagttcatcgacttagtgcaagtactctcttcttcaccttagccatggtacctcggtctacaagccgtcgcttggccttcaccttcgcttagttcctcgaagccctttccttgctatcttcaccctatcaagccattcttgagtcacatcctattgagcatccattgagagaatcatttcttcaatattgtgaaccttgcttgaatgtcatctagatataactgctaagatcaatcaagctctagtttgattctcatatattcatatatggactaatagtaatatggtcaagccaattcacgattcctcatatcttattcactttggcttgatcaatcctcttaatcacttcaacctctattatgatcatatttatgcatagtgatttctcaggacttgtccatatattcaaaccaatatagagaccatattatatccatttgcattgtctcactggttatttgaccttgtgttgaaccttgttcactgatcattatacactattcaagtatgttcatcatactgaatttcctgttcaacacttagcaaacttgttagacctttaaatgtgttgttatccaaatcaccaaaactcacaaaaagggatgaatgcactttcagtagtattcatatttttttggtatttgtgatgaatggggccttaatttttgtctcgcatcgggccaccaaattctcagggtcggccctgtctgttacttcttagagatcctaacttctatagacataagtctcacgttattcagattctcatcacaactaaattctccaaaaatctacattcctataaaagctcgcgaaaaaaagttgaaccaaacaaattaaaagaaaaacattgtgatattgtatatttttgttcatcagacatgccataatcaccggccacatggtggcttgcttccacggtccacacacaagctgctaaaagtgtcagccaaatcagaagttgtggccaggtctcaattttgaccttattatttcgttatcagtcctgccacagtttgtcacgtctaagattatgcaagtttgactgagttagatatatgtttggtttatagccacaattatagcagtatttttgttctgttgcgtaggtcccactcgtcaatgactcgtaaaaatgtggtagattcacttaaacattgctatagttgtagcgtataatttaaacgcctttaaatatacaaccaaacatgccgtaaattcaaatgcgcatttggtatgaattaatccattggatgagaaataactcctcatgatgacatgtatatagaagacgattcctaaataaatacaacatagatttaaactagattttagtcttttgtactttaattggtgactaaaagggactaaactatataattccaccttttgcctttactttattgcagttatactaatgatggaagaacgttaagggtattttggttatcttatgattcatttaatgcgttttgaatacttttattccttagaaccaaatatgatagagactaaattttagtcttctaactaaactttcgtctctagactaaaggaaccaaacagactcttagttcctatattttattctatttttatctctaaattaaaaaatacggaaactaaaataaagttgtagtttttgtattttacaatttaaggactaaaatagaaaaaaaattagtccatagaaaacaaacatccatcttaataatacggacaagagtagaaatttagaaccatggaaggaatgtttggaaaccgccttaacagcatgcacgtcgaaccaatggctgcaaactctcgtgcccgaaaatctccacgcgccgattgtgctgatcagaaacactatgtaagattgcatatgctaaatataaaaactagacgagaatcagaacgcacgatactagtgatgtgagcacgaatccagcaacatcgacgatctggagagctccatcgagtgtatcgtgtacttgtagacaggcgttctatctaaaactggacaaggaacactagggtcgattcggtcaataacacataaactcaagggcaacctcgtaacttggctggacgagcgtgagagtgggcgcgtagatatttacccgccatcagtcatcggtgtgtgatgcagaggcgatgccgagcgggtggagctctagccacgcccacgctcccgcctccccggcaaacacactcacgcccgccgaggccacatcctagcacgttgtagacgccgccaccgccaccgcctgacgcc

SEQ ID NO: 81 - DNA, 3000 bp, Zea mays
acaatttaatgatcatgtaatggaacatgtaatgtgctatgtagtactatcatagtgttactactttatccaattatctttggtgagttgaatggatggttaaatgatgctagaaaattttgtaatgatatttatatggatatacttgtcatttgtatagtataatattttgatagttgtttaatttttgtgggtacgggtgacccatacccacatgggtatgggtatggggataaatccatacccgctagtgtatatgggtaacccggtgaggttatttttgtgtcgtgggtatgagtatggggcagtaatacccggtgggtatttacccattgtcatctctactttcaagtcatcgaaccctctaggattgtttgggttcatctagagtttctaggtcctccagcactttcggaactgtctagaggcttcacagccatcagatatgtcgtggtcgttatcgtgtttgtgactggtgtgcagatggatttatttgctacctgagttaaccaatagaggaggaaacaagtggattgatggaggtgtaacgggcatataatggatgaagtaatggacaaacatcatgacagttatttcatctttgtatcttttcaaaattcatgccattatcttctacttatagcacgcgagaagtcatagatcgtcaaagatggaaacacctcatttatctattgagttgagagagagcgttctcgtcacattcctctatgcatacagagagttgggagagcacatcttcagaattgttgagtggagacacgcgctcgattgtgcggatgttctggtttttatggagtattttcgcgactgcttaccgaagatctcaatcttagtggacgttcgagtgatggcgcgacgaacatctacctggttcattactttaagcgacatacaatgttaacttatgtgaatggagtcactggttccttaagcattggtccctccgtagggtacaccctggtctctgaatttgtgaaatttagcttagtttccactatgatgagtataacactattttttgtgtttgctactagagtgagtagtagatttacacgcaagcacatatatgacatcacatatttgctatagattttttgtatatgtgcaaatatgtactatactcaaattacctaaattcttaacaatccaaaaatagatattagacatttgattttgctagtaggacatttttgcaagaaatggtatggtaagatgatctacgttgccaacaataaacttctatcacaccacacaagggaaacccgaatagtttactcttgatgaagaaaaagcgttcaaggttgtcggtaatctgttttaaggcaccatgtttagtgctcaggctgattataatgtgcataactggcaaagagatgtgatgcattacataattacatgagcaagaggatgcgcacgacatggcactatggtggcgcacatcgcctcctcgggtgcggttgaacaagggaaggacaaggagggctatgcaccagggtttgatcggccttattcgtttgtccaagaatacatcaggaatcgttccagttgatcgaatcttatataaattagagaaccaatccgacaaaaaaaatgttctagaccaccattccgtgaaaactgaatgaccttgagcctacgacaaacactgcctcctcaatacacattgcaggacacccattcgatcatggtgagcgacacctctaccacctgccaccttaaaagcttcagcgatcgagtgctaaagaaggtggattctccgctaatttgtaagcctccaaaacatatgttgcctaaattttacactataaatttaagaatcggatcggattaggattgagccctatttctattcatttttaaactaaattagttaatgacttaaacgatttgtgaagaaacatttggatcgtgatccattaccatccctagtcatatcgctttggagcaaatgattagtggctcagagtccttctcaagtgtcgtcctccaaacgaggtgagattctaatcatgcaacatatggacttgaccatgggtctttcaataccaagtaggtcgggaaggaatacctatatatgataagctattcgatgctcggctgaacccatccaacatcgaaccactgcatgctctatttccagacgataacgaatcacataggtagtgacggagacgtagggccacttgttagactgcatctgcttactagggctagtttgggagcccctttaatactcttcggttttgtggctcccaaactagtccaggttagtttgggagcccctttaatcctctctagttttgtggcttcaaaactagcccctaacgtgtacgataggacggtccagccttccgttgttatcccgtagacatcctagagcatttgatagaagcatgtcgtctgtatagttaaagtcttgtaccttaattgcaatgatgcgcaaaccttttgcagaaaaaaaaggtggtgtcattgttttcaaaaggaaaacggttataatgatttcacaggagtaattcagcccataaccagccacacacgacggcccatcaaagaaaggaggactgaaccggtcgactcctgtcgtccgagtccgacgtggggtgcatctgatatgccaagttccactgttccaggctggcccggtcgttttgtctgcatgcacctgggtccgtacaacaatcagcaataaccaataggaacgggggagcggcgggcgaacagcagcatcctattcctcctacctcactggctcactctcgtctcggtttacaaagcctccgccgccgcaagtccactccacccgttgtccaggttagttggttggtttcaatttcgagttcgccgagcgacagcttgcgcctgccatttctcggctccgcgtgccggagctcgttcatctccagcttctccggccgttactcgctctgaaccgacgacagtaccgataaagccccgactcgccatcctccggcgacg

SEQ ID NO: 82 - DNA, 3000 bp, Zea mays
aggcgggcccagcagtcagagctccaacggtcggaaccctaacggctgggtgacgtggctgtcgcaccggacatgtccggtgtgcaccggactgtccagtgcaccatacgacagacagcctccaccaaactagccgtttggtggaggctgtctgtcgtatggtgcactggacagtccggtgcacaccggacatgtccggtgcgacagccacgtcacccagccgttagggttccgaccgttggagctctgactgctgggcccgcctggatgtccggtggcgcaccggacatgcactgtagagtgtccggtgctccacttcacgcgtgcctgacttctacgcgcgctggcgcgcatttaatgcgctgcaggtagccgttggtgcctgaagtagccgttgccccgcagttacaccggacagtccggtgtacaccggacatgtccggtgaattatagcggagcagttgatgcgaattcccgaagctggcgagttcggagtcgcgtcctcttggagcaccggacactgtccggtgtacaccgcacactccggtgaattatagtgcgccggctctgagaattcccgaaggtgcgaagttcagcttggagttccctggtgcaccggacactgtccggtggcacaccggacagtctggtgcgccagaccagggctgccttcggttatcccttgctctctttgttgaacccaattcttggtctttttattggctaagtgtgaacctttggcacctgtataacttatacactagagcaaactagttagtccaattatttgtgttgggcaattcaaccaccaaaatcaattaggaacaaggtgtaggcctaattccctttcactatgaaacctatgggagtccataaaaagtttggagtgaaaaccaaataaaaaatgcacttaatagaaacctaggatttctatgtgtaccagactagtccggtgtgcaggggaccttgcaccagaccgattaaatagataccctattctatggccaaaccgacaactgagcataggtaaggatggcaatgagtacccaaaacccgataggtttttactccattagggcatgtttgggagcaagtggaatgaagatggttgaggggactagaatcccctctattacccttgcttccaaacaagaccttagggtacgggcttgaatcagttttcatacacatgggtttgttaatatgcataaatatataccgataggttcatggttacatgtttgttcctatagtacccaaacccgtgaacccatgagttttttaaaacccgaccaaacctagtgcatattatcattttattttataaacgaacaacaaacttgttgtctccacccatttacttcctaatttttatgaaatggtgaatgtataagtagttggtgatgtggagcttatatatggccaacaagcacgtgccctgcgtgcctggcacgaagcccgctatttagggccaatctaagcctggcccagcatggctctacgtaaagctcgagttcggcctagcatgggaggcatgtcagggttttaagcccattggactagctcgagcacaacctgttcctaaacgagctatagactcggctcgtttaaggtgtgtttggctagggagtcaactagaatggagcgacttcattctagtttttgagaatggagtcgtttcattctgtgtttggcaagtagaacatagccgctccatttttgtttggttgaagagtagaataaagcggagtcgctctgttctttgtttgattagagagtcgtaggagtgtgaaggggaggagagagagagaggggagatcgctcgtatcctgtcattttattggagcgggagcatcccaagtatttatgatatattcctatatagagactcaaggagtcactctgctcctttttcgttggaaaccaaatatatgaaaaatagaaatataaccactctattttttcttactcctcaaccaaacacatccaactattgtatgaacatctttatcctttatttaatgtctatcattttttatgatctgtgtatatacgtgtaattgtgttaagttgtatccttcaattatgatttgtgaatgtgtttagttttttatggtgatataattctgagttttctttatctaccagcgcaagagaatattcattcttgggtcgggcttacttcggtcgagtccatctatgtcgtgctcgttcagagatttcaacccaccgtccgacacaacatagatagatattcagatctaactatgtcgtgtttaagcgagtcatgcttcaacggacctgaactggaccgtcttgtgccgcccgtctaacatctctagtggagcttttctatattcttgcacattactatagagatatgtatagaaaagaggtaatgagaaaacaaagaaacagataaaaaaaagaacagagatgctgaaaactgaaaaggaaagaagaaactgttttcccctgctatcaatcctagatccatcccgagccaccttaaggccttgttcgtttgtatcggattgcacccggaatcgttccacctaatcaaagtttatataaattagagaatcaatccggttagaaatcgttccgacccaccaatccagcgcaaacgaacaaggcctaaaagaggataccgatttttgtgcaatgtgtgagaagagacatacggagtcacttttacatacaatacaaactggagctgcgatttgtgccttcttctctttgaaggctagctttgatttgtttggaggagcatgcgggagaggagtcgtgccaggcagcgtgttacggttaagattagcaatagtacatgcatccttttgcccggcaaaacggcgtagcatagtggcttcgataattacgagaagggcagggcaggtcgggatggtctctctctctcacccccaccgatctgggaaggcattgtcttgttgtactttcccttccggcagtggcctcgattcgcatctccttttcccgtcc

SEQ ID NO: 83 - DNA, 3000 bp, Zea mays
cgaagtaagcgtggatactccacatgtgccctcctgtcgacgttcgtggtgccggtcccggggaggggagttgctgatgtgccgtctcgatcgtccccgggtcgggtcactagttgaggctgctgccgactcaactcgggtggcgcgacttcgagccaggacgccacggtcccgatcgtactcctcccggcgccttatctcgttttcgtgtcgtcgttcgcgcgaagcattgatggaactccgtgcgtctcgccgactgttgatggcgtgccgcagatcgctcgaaggccgagcgaggggtagaagatgattagctgcccgagtgagcagtcgccgatagccctcagcatctagagtccgcgggatgccatcagctatccgagccaacactcctccgacttcactcggcgtgttcattgcacgagcaaagtcagggtttaggtttcgagcgaagagaggattctctcggcgtaaccttgcatcatgctcagcttgttctcgatctcggtcttgagcctgccggcggtcacgtcggcaagaattcctcctttatctgaagactcgttcatcaggagtttctcctatttctgagacatcatcctgggatacgggctgcgctaggtcccgttccccagcctcgtgatgtcgccgaatattctagcgtctgttcctccgtcgccaagcttctcgctggggaggttcttcccctggcatggttggctcgttgtcagagatgggagatgactccaatctccccccgatgaagaggacgtcggggtagaaaggagttgctgcggtgatgaattcctttccgtctttctttgagggtgaaggtgtcagaaggataacttgacaagcttccaccttgcttgcttcctttttccttgtaatccgtgtccactcctttgtgggcgaagtgagcaacggggttcttcgggcaagtgaattcccggctctcgacttgcaagggacagtcttcgtctggggcgcaggacgttgcactattcgctgcttcgttccgactttctcggagatttccgaggaaggcttcttctccggtggatccgctatgcggtacataattcccttctcatctgttacggacgagatggtcccgaagcaaaatacggatccagggcggagagcaatcttgcactaggaagtgacaaccattgagctagcttggatcaacgacacccccctacctggcgccctagctgtcggtgtttggagcccgaccgcagacctggggttacccctcgcgacgcttttgggtaggacggtcttgttgactgtaactcaatggttcgtgcgagatgtacgagggatgacagaggattttctacaggttcggaccgctttgagatgcgtaacaccctacttcctggcgtggatcttttatgtggtaggttacaagggaagtctcctgtatggagaaaagctagtggctaagtagatggtcgatgattctgatggggtacccctagccctaggccttatatacttgaccgtgtggtattacatgcgtgtatgatgacgatgtgtacctaagtaatagtgaactgactgaacttatcttcctataatcttgccgacttatccttattttgttctgacgtccgagggcgctgcgcgggagaatcggatcagcgctgtggataatgcttaaatccaacgagccgcctgggcctaagtctgcttcttcctcgcgtcggcccattccgccagcaattctcccctggcccacgaagggacggccttgcgagacaataggcccaaagcctttcgcgaggccttcttgcattcgagtggacccggggatatccgtccccacaggaaccaaacccgaatagactcacaatttcggttcggtccaccgaatagacccgaattatagagagactagtatattttgttaaaatatatacaatgaataattaattgaaagtactattattacaacaagtgactataaaaattagcatacaaagatatatatactattgttaatatgatatcattatttctagctaataagttcataaatcatataataataccatcacatattatgagtttttttatatttcgggttatttggtctattcaggttttaaaggttaggaaccgaacccataccccgaaatatagcacatataggaaccgaacccgaactcgaaaacagaatagaccgacaattcgggtttggttcggattcagttttcggttttaaaatgcccaccctaccggctacgacacgtgggcacatgctccacttaacagcgacatgtaatggcaatgacatcgaagggatggaaaataaccaatggctttgaatgaaacatataattttaaatgatatctaaaggattgatatatgtttggatgacatggaagagattttgtccatcgtatcacggtattagtatgatttgaatcttgaagtcgatttcatccaggtaggccacacgacacgataggacaagcaggcggtatccgagttccgagttcgccacacggcactgcactgcacccgctgcatggattttcgcgcgtcactagaagctccctgccatccgataggccattcaacgctacgcggcgcgcatcctttgcctggatggccccagcgaaccagcccataaacctttttcacacgtctgacttgtttaccccgacactcaaacctactgatggtgggccggacccccctagtgaaacgccgcacgcaaagaggaagacatgaatctagtgcccccctcaagccagtcagaccgtcaccccaaaccggtctttgtcgcttcaaaccgtccaagggattcaaaacgcaaatcgaaccgccacgtgttcgcttggtttctttctttctccctacgccttgtccgctcctctctccctctctcgttctcgtcctcgtctttctcgagccgcgaggcgatcgcatcggagactcggagccggcaaaaccctaaggggaaggtttctgcaaggaggagggag

SEQ ID NO: 84 - DNA, 3000 bp, Zea mays
gatttacccccatacccatacccatgtgggtatgggtcacccatcgagtcacccgtacccacaaaagctgaacatctataaaaatattatatgatacaaatgtcaagtatatccatctaaataccattacaaaatttctagcatcatttaaccatacattcaacacaccaaagataatcggataaagtagtaacactataatagtactacatagcacattacgtgttccattacatggtcattaaattgtcgttaagccttatatgacattatggcctaaaaggttgttaaatagtaaaaaagatgaatgactaaagtcaaagttcatgcttgagctaagtttatattgggtattttatacccacgggttaacgggtatgggtgaaggcggaacgttctaatacccgtttacctatttggtgaagatttttgcccaataacacacccacgggtagaatatttagcccacatgcatatcctaatggggtaaatacccatcaggtatcgggtcgtgggtacccattgccatctctagtaaactatggttgtagaggatcgttgtcgtcatatgatgtgttttatttagctatctttgtacgaaaattttgttatgtgataaagattgtgacattgatttttgtgcgctgagtcatcatatatgtgagacttaatcctgccatacatgtaagatacatatagatttgtccttaaatgctggtgtaatatttcataggctgcctagtccttcgtttagagcggatgagtgacctagcacacacccatattgtagaggcaaagctagaaaatggaaccactggggtcggctccatcaattattgaggtcaaatacatgaataaacaatattaaacagtattttacactgaatttgacaaattccattgggtccggcgaccttgtgccttaaggcagcttcgcccctgtcatattgttgttgtgttaagtgtcatgatatgaatccaagaattgaaggaccttggcctcaatgttgtccacgtggccatgaattgtatcccccctgagaaagccaaatattctaggcatatggagagagaactgacccttctcggtccacagacaaaatcattttgatgcctgaggttgagggccacttcttcgttgggtagtgtttggttgaagagccaagtaagaacggagccgttctgtcccagttttgttgttgtttggttacaaagtaacaagaacggagtgactccaatttgggaatattctcctaagatccagaaccatcccactccaaaaaatcaatgggacggagccgctccgttcccagcccgctcgcacagctcgccctcccttccatgcgcagcagctcgcgcgcctccctctgcaaccaaacaaaaaacaaagtcattctgttccagttcactctgcaaccaaacaaaaaaacagagccgttccgttccagcttaccaaacacagaacagagcggctccgttcctagaattagggatgaaacgactccgttctacttggctcctcaaccaaacactacccaagctcttctccatgatggacgactcgcaggaggagcgtatgattaaggcatattctctgatcgagactcgcctcgatgtaagctcgacggctttgcttttggtctttaagtccgatctttgccagttttgtgtcaaatgtcattgtgatcatctgtccatgggtgataaatagcgttggcatgttttgtttgtatgtattggaccaataaaattaaatgatatcctcttcattgttttttatttatattgttttagttaaaaataaattgatgatggatgatgataaatatttaagaatacagctagtatgatgctgccgtgttgcccgccgtggaaacggtcgtcgctctttcaaatcatgggactcgttcaaaaaaaaaacgttgatccggaagaaaacttgagggagaaaagaatacaattccactgaacaaaccacttcaagattcgtgcggttcggagtcctagcgttgggagattcatgagacgttgagcaccccgcacacatcttttttttccccctttgctgtcaggaaaggaaggaaataggacccgaaaaatccacagccacatgcatgcaatgcacaccatcctccctctccagcttttggctcaggtggtgaggtaggcttcccgctctagctaccgagactcaaactcggctgtgctgtgtctgtgtgggtggccttctccctcccgcgcgccaaaggcccacggcggcacggccacgggcagccgccgcccgccggccgctgcgagccaccacaggctggatcctgcaccgctggtggtctcccggcccgtcaggtgactcctcgcctcgccactccctgcatctctctactagtctatttcccgtatacgtacatgcttttggccttttgggtgtgggggagcgcgggcggtggtggtgcggatagccggcagatctcgagagctcgatcgatcgtcccatgttgggtgagaaatgatgaagccgtgattggagagggaggagccggtggatttccgacgatgaaaagtttcggatggatcgccgcctgccgacaactagcattgcgcctgccgtctcgggcgtgggcgctcctgcatgcggtgttcggtccgcagcgtgtggcatgcgggccgaatccgaatcgggcatcacgattcaattttggtgggctaaatggatttaccactgggcctcgccgcataacaaaacatacgagcattcgggtctgtttggttcgctgtctaacttgtcatatttacctaatttttttatctaaagttagttctttaattcaaacgactaacattagacaaagtatgacacagtttgccacgacccaaatagtcccactttctttcagtctctggcactacttaacagctggatactcgtgcatttttttttacatttttttgtcacgcagatcctgatatatcttcaaagataaagagagaaaatcataacag

SEQ ID NO: 85 - DNA, 3000 bp, Zea mays
taggatcaaggacactggctagaagaggtaaatagatggttttaactaaaatcataaacacttgccaaatttaatttgtacaacaagataatcaaattatctagcctatgttgatctaaactcagtttgcaacctagggtgacaagtgatctatatagctagaaatgagagatagcacaaatagagcacaagtaataaagatgaaataaagtaatgaagacacaagacaccagatttttttaccatggtcacggtgatttgccgatcacctctaatccacattgaggtggattcaatgcactcacacgctcctctatcaagactccacttgatctcttgagctggatggtcaatgaattgcttgaacctcgattccactaatgtcacttttcatcgctctcgtgaggcaagtgtgagactttcataatcaacatcgcaacttctccacaaactttgttggagagctcgacggagaatccttcactaagccatctaagaggcggcaacctccaagagtaacaattcgacgacgctcacttgatgatctcctagtgcctcgagaatcaataacttgatgcaatgcactagaaccgatttttttgtattttggccctttttccaaaaaaaattatgtttagacccctggacgacttaattccattttggaccctttgctcggtgccacaggatatggcgtcgaggtaacactactcggtgccacatcctatggcgtcgaggtaacacttctcggtgccacatcctatggtgtcgaggtacgtgcctcgctaaatagtgaagcctgatggggcactcatgtggcacctagcttggcgccataggatgtggcgctgagaaaggaactcctatgaatcggtcgttttctcgctgagagctttacatagggtggaaatcttttgtaatgcatgtgtaaatgaaatggatgtcataatgcgatggttatcacattgtgtaaatggcatagaccatagttttcacacaagtaccataatgttataaaacatggtccacttagttgccataatttgaaacaaatgacatagagcacaacaccatacaagttcaacacactaatgtcatagaccacaacaccatacaaatggctagttcaaccaagcaaattacattgatacacaagtcttagatacgtctcacatacacaaatctcagatatgctcgttcatatgtgacagacggcgatcattgaccacatcctagtcccgggagccaacatcaacatcaccatcgaattggaaatcatcgtacaagccaatggcttcataatcctcaagtagaggttgcgaaccaataagaacttgctccagatccgtgctcacaatgtcaagacctttttcaattttagtaacaacactcatggcattaaccgggatattcttgtgcacatagtctagatactcaggcacatgattgcggttgctcaacctcctcaactcatcggcacagacttgcatctatctaatggcgtctaaaagacaagcccaaacttgatttaatcaatgcgcctacaacaaaaaaacgaagaatatgattcactggcacattagttaatgactatcattgctcaagttcactaatcagtacaacaatgacatatgaaactctaagtttaactaatatatctctaagtttcattgccacttgtcatgaccttgtttgttgatctatgagtctacaatacaactaagtttataatgtgtcactaacaaaacaacaaaacagtattgtcaattgacacctataatgttactggcactaaaacatatcgggtcatgtgtgctcaatgatcgatggcgcggacataatttgctagtgtcataaagaatgttgctcgtgtcgagcgaggcacccacagtggttgtgcccctactcccatccatcgtactagccccatttgcatcttccgcagcaacactctctgagcgaggcacccacagtggttgttcccatgtacaagtgatgcgctttaaatgattggggttgttgaaatgataaatttgacatcctcgtttaacaagtctgaaaatgatttgaggaaaacaaccaatgtaattcatacagaatgaaaatattaataaaaagaaaaccggtgattattgaactttatcgtataaatgaaaccaaatttaaagttacaagtagtaactagaaaagtgaagttagcataatttaaaaatattaaaaatttggtgttgttggagagtaaggttgattttattcccaatatgtatttagcaatttactaaatctgagtttatgtagttttttaagggaattaatggagatgctctaagggccgcccatggagtatcttgcttagccggaagccaattatcgtcgttgaaatttcctcccccgcaagaaaacgtaatatcattgtgatgattttaaaactagaaggcggatccatcgaatcttacctaccatctaaacttacatctccgcatacattaatcatatgcgaggtgctcagcagcgttgtttacatcatcgcacgcgacaaaaaacacactccacgaatggtaatgtgcatcatcgcatctcgcggcaaattaaagggcacggccggccattggtgaatcctgcggggcccgtcagccagccttggcccaccagccgatctatagaggacctttaccccgggacactcatctagccttggaacctagatccgatggctagcaccatggctgacgcggggtcggggcccacgctgactcggccggcgcagcatcccgaacggataagctcctcccgcgcacggagctcggcgaagcgacacccgccgcgtgtccagggagcgctcccgccgggtcgcagacgcgaggtcccggagccgcgcgccccgcctataaaaaggcagccattctcgcctggttcccgcatcccagcacgtctcgtctccctcccaaaaaaaaaaaaaaaactgctcggttgctgctcctgctccgccgcgccggcatc

SEQ ID NO: 86 - DNA, 1931 bp, Zea mays
acaccatgttagccaggtcagaaatgttcataagattgctgagtacttagaccaacaccacaaattcctttggtacaggagtggtttcaacaaagatatcaaatgtgattacatcacaaataacatggttgaggtttttaataactgggttaaagaccacaaagaccttcatgtgtgtgatttggctgagaaaattagagagatgacgatggagctgtttcactcggtgcacaaatcacttcacaagtgcccgatgcaacaacccagcagactccaccaccgacaaggaaatggctagttaagaagatcacccccaagaagagactgaggattagtgctcagaagaagcgtatctcaacgaattctttatgttcacatgatacttgaagtcgacattttcctgtgcaacaaccagatgataatcatggcatacgaatatattattttcctatcagtttacttgtaccctttctagcaacaaaaaataggagtgtatgagtttgataatacataccacatttgatgaggccttaactgcttcaaccttgtcgacgacaatgacgacgaactgaaccgcagccttggcctccttctcagcaacaacggccacgcatctcgcctccgaagccgcgacggcagcagcacgagccgcttctacaacatcgtcaaccacttggctcggaggaagatccatccgcagaggagcagagaaaaggcgactaggttcctggattggggaagcagacagcgtgaacacgaaatggcggctagggtttttggattggggatgcagcccgcgtcaacaagaaacggcggcgccagactttttgacggcgtgagcacagagtgaatttaatgttgacaccaaacccaaatctccgtctgttgtccatatccggaagagtctgtcagctgcgtcttcaaaacagaaaagccaacaccaacgcctctatttcatcgaattctcttctctcttcttccataattggcaattgtctcgacctaggcaagttctgccgttctggagcggagctcagctcagctcagctcctccagctgttttccttgcggaggccgccacggctctcggctgggccgccgggctacctcgctaagttgtcccttgttcgtccgttcgcagctctcgctgtcgcgtggcgtgtcagtgtgacagtgcaagaccgggcggacggcacgttgacacggccggcctcgcctcgcctggccctggcgtggcgttggcggctgcggcaaggcaggcagcacgggccactcggatttgctggttaaagcaactttagaaaaccactgccgtaacttggagtgcttggcttcctgggtcgagcgcgccgtaactagtgcaaaaaaaaaacgagagagatcgccattgcagagatctagtatttgaaaacagttattggccagatcaatggagaggatgccccacctgacctgagccgctgcttccgtccgtttcgtggttcgctcaaatcaagggacggacgggacgggatcacgggaggcgggactcgctcctttcccatttcaccccactccaccactcggccgcgggccgccagaagcggcaagcaagacgccaaacccggcgtgttcccccctccgtccggcctcggccagagccagacggccaccagtcaccacccagccccgcgcgaattggcccccacccaaacccgcaaatccccccgcccgcgcaacccaattcccgccttcctcccacccacccgctatgctgccgccgcccggcgccggcgcgcgctccacaccacgacgccgcggcacgggctgccgccgcgcccatgagggacggcggcgacggcgacgacgacggccacgcgacatcccgcgcgacgaggacgaagaggaagccgtcacgcgacccgcggccgcggccgcgcgccgacggcggg

SEQ ID NO: 87 - DNA, 3000 bp, Zea mays
agctaggggtagggtaatgatggcccccccctgtgacgtggtcggtccgagcccaaggtcgggcgaggcggtgactcctccgaggtcgaggctgagtcccgacccctggggctcgggcgaggcggagaccgtcttccgaggacgaggtggagtccgagccctagggtcgggcaaggcggagaccgtcttccggagtcgaggttgagtccgagccctggggtcgggcgaggcggagaccgtcttccgaggtcgaggtcaagtccgagccctggggtcgggcgaggcggagaccgtcttccggagtcaaggttgagtccaagccctagggtcgggcgaggcgaagaccgtcttccgaggtcgaggtcgagtccgagccctggggtcgagcgaggcggagaccgtcttccggagtcgaggttgagtccgagccctggggtcgggcgaggcggagaccgtcttccgaggtcgaggtcgagtccgagccctagggtcgggcgaggtggagaccgtcttccagagttgaggttgagtccaagccctggggtcgggcaaggtggagtccgtcttcagaggtcgaggttgagtccgagccctggggtcgggcgaggcggagaccgtcttccgaggccgagacgggggcgagccctggggtcgggcgaggcggagcttcctatggcgcccgaggctggacttagctgctgtcggcctcactctggcgagtggcacaacagtcggagcagggcaggcggcgctgttttcctgtcaggtcagtcagtggagcgacgaagtgactgcgttcacttcggccttgtcgactgaggagcgtgcgtcaggataaggtgtcaggcgatccttgcattgaatgctcctgcgatacggtcggttggcgtggcgatctggccaaggttgcttctccgcgaagcctgctcgagctgggcctcgggcgagtcgaaggtgcgcctgttgcttgaggagacccttgggcgaggcgtgaatctgccttgttctactgttcctgcccgaggctgggctcgggcgaggcgagatcgtgtcccttgagtggacggagccttgaccggaatcgcgcccatcaggcctttgcagctttgtgctgatgggcgttaccagctgagattaggagtcttgggggtacccctaattatggtccccgacaatagggctccggctcctctctgccgaacacgttagcatactgctacacccccattgtacacctggaccctcttcttacatctataaaaggaaggtccagggccctcatacgagagggtggtcgcgcgggactctctctctccctcgcggacgcttgtaaccccctactgcaagcgcatccactctggcgcaggacaacacgaagccgcggttttcccccctctgtgtttcgtctcacgccaacccatctgggttagggcacgcaacgacaatttactcgtcggtccagggaccccggggtcgaaacgccgataatttgttttatatatctatatgtctacgttcataattatctatataaatatagatataaaaatttagagctaaaatgactattattttagaacggaagagtactacgggataagatcatagttgtgataggattggatctggaaatcgtaggagacagcggaggataagctatacacatagccgtacgcgcacgcaatatacttgatttgtgttcagtgggggcgcaaaaagctcgcacgagaaagggcagagcagcatgttagcccacagaccgagatgccacgtgcccacgaggtcggtggctttctctctcttggtctgggtttcaggctttcagcagaactgcgcgcatgcatgattagctagaactagaagcgtgggagctgggcatgcatctaacatgcacaggactctggtttttgagagatctcgtggtataatccactggtctccttgtttactgcacacatttgttttttaaaagtttatatatattattattttcgttctcgttgtcggctaatttatttttaaattaaaccttaaaaaataaaaaaggatggaggtagtactatggagtatggacggtgacgacgagtagtactcgcatcggaagcagtgaggcaggtactggaaccccatggcacatgcacaccaccgtctaaaaagcttcgagcggaggtagcagcaaacacatggtttttgtttcgcccccaaaaacaggttcccaatcccacccaccgcttctccttctccccgtccgttgctggtatggccaactttattgtggtgtggcggataaagaagatccatcctatcgctcgctgccgatgcggctgacgtctgcggtcgtcatctgcctaccgaaaactgggagcgggcggacggagcgccagcatgtgcagttccttccgcccccagatcgccatcgtgagaaaaatgcactttttaagcctgcttgttccttctcgttaacagtctcactgtcaccgtggctactctcccattagcttgtcaaactagcagcagtagtgccagtggttggtaacttgtttgctcttcttcctttttcgccccctcccaaatcttgagtggtattagcacacagatgcccaaataaaacagtacaaggagcagtataggcccacgcgcatggtgtcgcatgcgacgcccgtctcttttgtctccctccctggaatggataggttcataggtctcccctgaaaagtgcatgggctccaaaacaacgtccgcgccgcccgccgcttctcccctcccctccccgcgtccgccgattgtttgtgtggttggggtcccccgcccgatgcttggcggcgcaacggcgcctataaatccttggcctctcctctttctggcaacacaaaacacatccatcctccttgcaactccagtgctgctcactgccactgccagcagatcgagctgctccgtctcacaaaccctctagcttgctttgctgctccacctgcaagtctgcaaccgcgtacagag

SEQ ID NO: 88 - DNA, 3000 bp, Zea mays
gttgcaacgactatgtatgaccttgtggctataaatatgatccttaacgaccatttaaagtgtggaggcgaggaacataccagaggaattggtgctccattcgagtggtttccatttgtataatgattagtgatatatatggtgattagtgtgtgttctttgaggaatgcttagactagttagaccatcacccacacgcttgctctagatttaggtctagtgtgtagtgaggtctatatacctcttatcacttgatacttgtgcacaccattattgtaattatatgggcgtatagcattgtgataccataatagctatgttcatggtatgactgctactgtttacctaagaaaacgaagtctacaacggtttggcagaaagcttgatagtgaaaacgatggagaacggaagatattaccttgaagacccagttaaatgtagataaggtccatagactattcacgcagttatacattgggaacttggtgcctattgaaggctccaacaaagactatgagaaagcttacaagtttctcgatatattgataaagatactgaagtcttcgactatcgtctctatactttttagctttcgtatttatattttctaccttagttatatactttattttttagtttagttgatagactaattgatagaattataatgcattacttttttatgatagtatcaatacatttagtcaaaatctagttacacatacatacatataaatagtttatttatttatatgttttaattagagtcaaaatgagatactataattagaaagaatttttaaattgttgttggctccgatttggggccaaacactagggatatacggatgtaccttctggcggtgctctctgtgagagtgcggacggtccgtgacctcgctgcaggagcatatcttccctgcatcacattgaacgatccacgtgcagggcttagacggtccgcgatggcgcagagcatcttctggcgacatagaaacctggatctcacctcctgggagggactcgtcgggggaccgttctagggggtgcttcgaggtcggtaggtcaccctatgcatgtccacttccagacaacgtagagtcgtgtagggatgaagaaatatgtcgagaaagactaatgctaaactattttactgctactcgtagggcaagaaagtaaaggaaatgtaatgtttggttgattggttcgattgtcagggcgcaatcagccgtacccattcatatgtatagggggaggtatgaacctgttcctagacgttctccaacagattccgcatgattaaatggataatcacgcatggaaaagaggtttcttcgtctgagttaattatatcgtggaccgactgagctacctcgtggattgtccgagacgtggacccgtttgggtccggccatattgccggaccgtccggtcatatcacatatgatgctcaacaattgtctaattcattccctcggagatcagtgccccttcattcacatacgcttttcattaacgctcacgtgtgtgtgttttactttcgatctaacgttatgtcgtctttgtctcaactgtcgcataaaaatacatattaggtgaagacgcattaaaacaaaggaaaatttcggcgcttaagtagaattactgttgaccgattagaccaaatgattaagaaatgagaaatctgacgaggcttgcctgctgtagatttctccttcaacaagatgtgatgggccgggcccaacgtcgtgttccgtgatgttgctgctgctgctgccccgatgttgttgctgctacctgctgttggcattcacaggggaggcttgtggactggggttgtcaaggtacctcgtccacccaaaagagcacgagctcgatgtgtcctcaggtataactgcactccgcgcccccccagatatgctcacgtatggagtcgcattttttgattgttacgtggaatatatttcgctgcaactgcgttactcccagtcacatgttcgacgtgcggacctgaattgctgatctgcgcactccaaatatcatgctttatttacaggacaaactggagccatcagtgtctgggaaaatattcagtggctgagctgcaagaagtgcgatgacagccagacgaagttaaacatgtatgtcagtgaggcgtgcagcttccagagccagcagggttcttctcgttcgcaagggctaccgctagtcgctaccggcccctcacaagtcacatctaccccgtgcagcctctgataggaagcaactggccaactgccaactaagctgctccagaacaatagcggtaagagcaaccatgcctcaacccacaacaagacagcgctgaaagggtagacgagggttcccgggacaattatttgcggatcatgcatgctccacgcttttggatttaccctgttgttttctccaaagtgagattttagtcccatgtcccttcgtacctgatcctcttgcccccctcgtgctcatatagagaattatgcggtcaaacccatctcagctcatgctcgggtctatgttctaattttgcttcttatgccgatagttcatggccaagtcttaaggtgagaggtcgcttaatctccgcagagcttctaggatcagaactccgtttttaattaaaagtctgtttctgtgctttcgtttcagttgttctttgtttctttttatatggaattcccagttttcccccccaccgagtgtccatttctgtgctctgggagcccgaattcatatttgatgtggactgtggagtatagcccccccctcgtacctgatattcgttccagtctgtaatctgtgtctctagttcatcatgtgattaaattcctaaattttgcttgaaagaatggctcgagtcatttgtatcaaccatctaatcttgagatttccttttggttcttccagcacgtatgatgttgagctggaggatgggctcctaaagaatacccaagcagtccttcggagtcgggactagac

SEQ ID NO: 89 - DNA, 3000 bp, Zea mays
gcccccacgtcaccctgcctagggcacagacccgccacgtcaacaggaagcgccatcatcatcctaccccgaatcgactcgggtcacggagaaccagaccggcatcccatccggccagctccgccggatgggcaatgatggtgctccaccagctctgtgacgacggcggccccccagctctcttacggaagcaggacgacgtcagcagggactcgaccgctccaacagctgtccctccgccaggctccgtcgcacctccgacagccacgacatcacgccagcaaggtgccaagatctctccggctgccacattggcatgtacctagggcgctagctctctctccgctagacacgtagcactctgctacaccccccattgtacacctggatcctctccttacgactataaaagggaggaccagggccttcttagagaaggttggccgcgcgggaccgaggacaggacatgcgctctcttggggccgctcgcttccctcacccgcgtggacgcttgtaacccccctactgcaagcgcacctgacctgggcgcgggacgaacacgaaggccgcgggacttccacctctctcacgctcgactccggccacctcgcctctccccccttcgcgctcgtccacgcgctcgacccatcagggctggggcacgcagcacactcactcgtcggcttagggacccccctgtctcgaaacgccgacacctggtgtggaagaccatcctgcctctaagaaataaagaccgaaagtttaggaaatggtcgccaagctgggagggtccatacaaagtaaaacaggtaatatctggtaacgcctatttattacaaacattacaagacaaagatttgcccaaagctttaaatggacgtttcctcaagcagtaccatcctattatgtggcaagatgttaagaaaaccgatgtaatcatatcgagttagttgcttttggtttgctcagctccaccaaaaggcagggggcatatgttggtcaccaaattgagccgccggacggtccggccctggggccggacggtccgcgcgcgcgcagaacagattagggttccgagtttcttgctgtgtttattgacgaaattcacggaattagctcggagagtttgtttgtaaagggtccagcccttctcctctataaaaacaaaggaatacgaccgatttatataatcaattgaacctacaatcaatacaatttacattttatcttaggagtagttctagtctaattttagtttagtcttccaatccccaaattctccgcttctattcgactctacgtcgattagaggagtctaggtcggtctgccgaacctagacaacacctaggatctctcctccccgacggattccctctcgggagcgagatccaggcgccgccggcgacttccgccgcccctgcgcacgcgcggaccgttcggcctcagtgcgcggaccgtcaggcagaaaaaactaagccctgcgccaggtcgtggaccgtccggcccctggccgcggaccgtccgctcctgtgcagagagcaccgccgcggttcttgtttagtgattggcgcccgaaaaagtcaccaacagatgtaaacatggtgctttttttagagttctttataaaaatatagaaagttgttttgtcagagaaatccgtgctgaggtggcataggaagagcctacctaaaggagcctaatatgtggctaacctagtaacctttgacctgtcagcttagaagactgttatgcaagaaagattgacgcggcaattctatttagccgcttcaataaagaaagatgcgaccaacatgttcgttaaggaaaaaaatattatttttagaaacattttaaaaaggttattttctaaaaataaatccgagggcggagatgaaagtgcaacgaccggctggaggccgggagagcgtgtgagtactgtgtgatgacgtgatcacacggagcgtgcacggccgggcgacgcggttggaggccgtacgcggcaaacgacccgttcccttcctgacgccacgccaccaccaacacgacgcgccgtccgtcaacgtcaggtaaattgaagaagagccgccgtgagcctggctgacggcgaaggaagactgggcggcgccgtccgatcgggatccggaggctggagggggtcgggcccatagggcctgcaatgaagacgcgcgccgcgtttgaccgttgcgcgcagacgctttcccgtccagtcctacaggctacaactacaagaggggaaaaagacacgaaggaaaaaaaaaccagagctggaaggagagagaaggaaccaaaaaaaaagctcggaatttgtagtctccaagccgtgcgacgaccggacgggaaggggaagagagggagggccgccgctgaagtcgccgtcggtgaggtacgtccccgtcgcccttccggcggcgctagatcccgcgtggggggactgcggttccccgcgcctgcaaaggcgccggtcggtcgggccggcgctgcgtgtggcgtgtaccctttcgtgtcctgtctcgctgccgtcgcttctcgcgtgggggatggggttcccctcgttctcgccgcctgccggctcgtggtcctcgtgggattcgcatgtagaggtccagtttctgcttaggttcgggggccatggagctggaggcagagctgttgctagggttcattagtgtcggctcccgagtcccgactccagcagtccagtttcagtaaacgggggagggcggtataccctgctcttcgaaatggaggctctccatttttaggcacgggtcagcagcactgcccctgtatcgcatcttaaggtcaattacatatgtcgacgctattctcgaccgtgctaccatcgcgttgatttttagtgagagtaacatctgatcattcatttattcttacccttgccgcgcgcatattcctaccaggagatcggttcctgcgtgcagaggcggcaacaagcgctgcagagggaggagggatttggg

SEQ ID NO: 90 - DNA, 3000 bp, Zea mays
ccacagttattggtatagtaaataatatccgataagcaacaaatatattaggatagcaatccattctcctaacaaactcaaaaatttccatagcagacattgatctatctggcagtgtcatttgcaatattcttaactctgatgtcagattattttcctcaaaatcaaatgaatcatcgacagagaaagtttttgccaacatggtacaataatccttgagtttaatgtgatccaatgatttcaacgatgctgagttaagaagaggcccaaatataccattgaatacttggaggtcttcaaatctattttttaatgaactgcttgccatatcaagcataactaaaaagtaatttacttcaaaatctttctcaccttgtagatttgcctcattgctgcaatcattttcatcataatgctttttccttagagcacgccgctttactggaaatgatgcctctacacccattacagaagcaatatccttggcaatcaccatactagaagtaaacccttcatttctatacttgtcaaagtaactcattataccatctatttgctctaaggtagagtgaagacacattgatgatgattgcaacttcttgctcacaacatttacagcatataaaatatcatgccatataaccataccaagaatgaattcaaaggtaccaatcaagtcatacaaactctttgcatcactctttgccatgggctcagtatcagaagcatgatgtaactcaaacaaagccgcccttatatgaggagcttgatatctaattgctgccacacttttgatacgactttcccaacgagtgttgcacaatgatttcacagttaaacttggcacatgatcaagtaaaactttccatctttttgtagaacctgaaaacaatgtatatattctttgcacaattccaaagaatgaaacagctttactacaagattttgccatatcacaaagagtaagattaagactgtgacaagcacatggcatataaaaagctcttggattcttatcaagcaaccgtttctgtactccttgatgatttcacagttaaatgtattttgcctctttaataatctttatgatagtgttagtaatatcagaagccaaaagagatatcaactcattctgaattttattactaagataatggtaatgaatatcctttctttcaattcatctaaggtgatcttgcattaccaaatcaaattctgcaaccatttcaacacaagccaagaaatttccattttgttcattgtaaagatgattattggaccctcgaaacgctaaattgcgtttacccagaaatttcacgatggcaactattctgaataaaacttgtctcatgcgttctttctcctttgtaatttgtcgttgcaaatctttatcgattgtttcttgttttcttagtctatccctcaattcattccaactgttcataccagtaatatgctcagcactattttcatgttctttcagtctctcactaatatgtttccaatctctatatccatcatgtgctaatgaacttgtgcagctatcagaattgaaaagcttacaacagaagcaaaacactctatcaacatgctttgagtaaactaaccattttctgtcatgttgttcaccattgcttaattttctaaaataatgggaatatgaaaaatgcctagagttgccatccattggaaagacaagattcttttctcttatcggtcccttctcgactaatgtatctcttgctttgttatcaagattattccaatttcttggatcatatatgtctatagtcactactggcggttcatcaacactagcagattctgtagcagttggatgagatatattatcatggtcacttacattatggtctgtaggtccttggtattctgaattcccaccaatttgttcgtccaccggctccacaagcactattgccaattcatttgtgtttctcggatctcccatatccctcttaagaaatttatccatggctcctttctgtgacaagacaaaatcctccgtgtgcctccttctttttcttttttggctacctgatgcatattttctaggaggcatgatgtcaacaacaatctgcaagaaattaataaaaaaattaataaaacaatctgcacacaatcaataaaataatctataaaatgaaaagcacgagaacctgtcaatcacgcagaaggcagtgcgtcgcgtcttgggctgagctcctgctcccagcgctagcaggcagcagcgcgcggcgtgggcagcgctagcaggcagcagcgctagcaggcgtgaaaggcaccaggcagcagcgctagcaggcagcaggcggcggcaggaaaggcaccaggcgcaggcgggcgcgcgcagcgtgcagcagaaaaatggaaaagcaggcagcaggcggcgataggaaaagcaagcggcaggaaggtaggcggcggcaacaaagcctaaagaattaaaacctgcggtactgcctaccctaatttctataagactaatccttatatcctattggactttatatagggtggggcccctgggagatgggggcccaggtcggctgcccctggcgccctgcctcaggcacggccctgggtgatcacttttaatctatgaaactaaataaagtaggaactaaagttccgtcccataaccaaagaaacgaaacaggccttactctaactgctgcaagcctcagtgcagttactggcggcagccgttcccgtgtttgtccatgtccatccaatccaactcatgcacttcatcactcctagaggagtgcagaagctgggaattgtacttccactactaaaaaatgtgattgatcactcgtttatcggcaaagatgtttctttgggagtgaataccgagaggctgagatcaccactgacggccgctgcagccacacggtttgcgtataaataagtagtcagtcgctcatcttgttccttgtgaacatcgcagtgctgtagcctccttcgtcttgagcgagc

SEQ ID NO: 91 - DNA, 3000 bp, Zea mays
acggacccttaaacacttccaaggtgagttgtgcatctttacccacaagtcgtgttccactagtatgagaaaacccgctacggattcaggcagaggtggtataggaatccctcgtctgaaaagctatcacagatagttcgacccgagaacctccctttacttgcgcaactcccctttcgggtaaggctctcacataccacctttcctaattaattggctaagggtgtcctataccacccttgtggtagcactgttgtctcaggttaagctccatgttccaattaacacaataatcttatcataaacaataaagaatccattatcaataataatatagcatggtcataattaatatataacattactcccaaaatcaggtagagcaatagcaagactacccaataattcatttgtctacaaggtgtagggtaaacaaaactaggtaacctattaggtcccatcagcttaacctaactgttccacggtgattaacagaatcatgaacaatattagaccaaagaatgtgatcaaggacacaacttgccttcaattgcgagctcctgctcagaatcttcaacttgcggagcctcaggttcctcggtcgcttgttcctttattcgcagcaatacaaacaaactacgcatcgtcgtccgcacgagcaggccacaactcgctgcaccttcctccactccacaccgtcgcatcaccatagggagctcacccgctagtgctccacaactggcatcggccttagggatgggaaatccgaccaccagatctccagatctatctgttgccccaacgccagcgtgttacggacaccaaccgccccgagccaggccaccgaccatggtcttctccatgctacaccacaccctccaaatagaggcagctccaccacgcggtagaactcccacgcaagcgtggcccgtagcagagccacggagctcatgctgccaccagagcacccaaccgcgcgaccatgggctgagggatggccagctatgacctctagcccaccggatcgacacatttctgtggcggatctggttccaagcgtgtcgctgcctccatagtcgttgcctccatagccgctgcctgtggccaagccaagcaggggacgcaagaggcgaggtcccgtggccgtggccccgccaccgccatccttgcatccgcgcggtctttcggcggtctgctctggcggtggcgaggcgggaggaaggaaggagaaagtggcgggtgtggtggcgatcgcggtgttgctgcccgtggagtgagcgacgtgggggccaatgtgtgtgcatgaagattttaaacatttttaacaaatgccttctaatatcttgctttaggtgttgatcatctggatgacctctttgttttatttcaagtccacttgtgcatcttttaaaccatattccaaatactagctggtaaataatattagtccaaatagttatgttgatgatcgaacatcaaaatctaactgtaaatggatctcaaactatttttacactgttttttttacgatgctcactacaccaaaaatataaacttcctacggcttcttaacttcctacagtttttataacaaaccgtagaaaattaccaacttgcgagagactactggtaactctagaaaataaccataactttctacggtttgttataaaagttattgtaagttagatttcagttgtttgacacaagttgtatattttacattgtctagatacatgtaatctaaaccgtagaaaaccgtagaaaattactaacttccgagaggctgatgttagcgctatactctgtcttgttgaactgtttaggtgcataagtaagacacaagttgtgtattttacattgtctagatacatgcatgtaatctaaaaggcacacttcgtgttattttgcagtatctttcgaagtggcatatattgggtatccaatgcaattttaggaggccttccacataatttacctttctttcacaacgatagacaggggaaatttaaatgcaacttttcatgaatataatctatatatatgtatctttttcataataatggctgaggcggcgggcctgcaatttgttagcaaaacggaataggtcgaaagtgtattactagcagggtttacaatttcggacagaaatttctgaaatttcggcgggtccgaaaaatatatatttcagaaattgacattttttatataaattatatcattttttgttttaaaaaattaaatctattttatttttgaactagaatttccgaaatttcttgtttttcgctcgggggcaatttttttttttcgtaaaccctgattactagtgcgacgatgtttgaagggcaactatattttattttatttttgtagatattagttcagcccaactctatacgtacatacatccaaacacgccctcagtacgtgcctcaggtggtgcggaccagccgggtagaatgtggtagaacggccaacaggtgagtgagagagagaccagggccatcagcagcagaggctatgagcaaacagacgcagagacgaggtcgaaaaccaagaagtgttttgtccttgcctagtttccattgtcgtacgttcttaataaaccgcgagctgaactgcttgtgttcgagagagacagcggattgagattgcaggatgccaggaaggggacgaccgactcgaccgtatagtccatccgtggcgtggctccatgtggcgcggacggacgataaggcgacaagtggtggcggacgcgcgcgtgcgatcaggataggccaggctggccgggtgcggccacgggagaacggtggccactcgtcccacatccgcttcgtcacgccccaacgagaggcggacgcggatccagcgacatggacatggctctatatatgccgtcggtgggggagcccctacaggacgacccaagcaagcaagctcgatctactactactactagctggtacacatactagccagcctgccagccagcttgcc

SEQ ID NO: 92 - DNA, 3000 bp, Zea mays
tagagatgacagtaagatgggttgttagtactaaataacaattatggataacataatgaggatctcttagtctattgcaagatcacatcgataacttaatccaatgtggagttgggtaagataatctcttataccggcactagtagtacccatggcgatccccttggttggcgtagtcgtagtcgtagttgaggtgatagagttcaccgatttgatgaggtgcctcctagcgtcacccgacactatcctgcacgtggagcacgaacttctaacccctccgacacatcttagtgatcagtgtaaataaatggcggatgagttgtgttgtggttttagaggatgtagcctctccttggtatttataggtgtttccttatttttgctgcccgatcaaggcaagtatatggacgtgaaatgttgttcccttatgcatttgagtgtgttttcttttctgttatttccatatctcatcctttttttgctgatcgatgtcacaagaaaactttaacaaggaaagttccaacacatgtatgagcaaataaccgcagatagttacccatcgagcatggatatagcggaattaatttgttatccatgggtacgagtatggatataataagatatccatgagtatgaatgtgcaatattcatacccattactcgatgggtatgtgacacgtgggtacccgtagccattatccgcgggtaaattatattattgctagaatgttgtttattattatcacacaaatgttgttttatattgtttgtattggggcattctcaatgggaggttcatgagagatttcattgcattaattagtatgccatatagaatttttatgacatgatacaacatttataatgaaacaggtaaaactagtttcatcgctatgaaactatgcctacccgtttccatggtattggaaagtgcgtgaaaccaccattgagagcaatttgtttaatctccatctatatcatctatttctattggttatttagatacaacatttaagtcacatgttagcctataaaattgtgtcgtgaaactcttcattgagagagtatatttcattctttatgccatcttacttttgttgacacgataacattggaaaatggtgtgatgaaactaccacagagaatgaaattgttgtttgatgctgttgtaatgatgctactggaatgttggaattgttgtttgatgcttctgtaataatgaaattgttgaattgcaataaaattgttgtttgatactgattgctgaaattgtagtagacggatagataacaggtatccgtcaggtagtggatactcgacgagtatggatttaggtatatatatctacatccacgagcgtttatggataaaagtatatgttaagttttatgtattcgtaaaccatatacccgtgtagtgcacacccgactgctatcttacgcgggaccatgaccacaagtcgcgccatgtatatgtatatagatactagtcgatgttcgttctaagagacagcaattctaaaattctcactccgtttgaaataaatagaagagtccaatggaattagtacgtgtagaacaaattcaatatatatgtggaatagttactcggcggttcgtcgtcaaataaattgtctgcttatgactatttgccagccaaatgaatttctgtcaggggggggggggggggggggggtcaataaatatgggatggcatgtgggatggcatgtggggtcaatagatatggaatggcttccctcctgttacgggcatgtgggatggcatggattggagacgaaggacaaatggagtcaaaaaggcggcgtgggatgtgctctgcctctgcctctgcctctactgtaacctggcttatccacccatgtcacatcgatcgagtttggtcagaactatagtgagggttcgagaattattgcgctaaatgacatgaaccggagggcagtgcaagcccagcacagcacgttgtgtaaagggcgtttgggcggcaggcactgacgagcgacgagcgaggctagctgtgtttggttctgaaaccttttcttttgctgtctgaacacgagacgagggaacgaactagaatcaatctagatgcgcccccccaacgcataacagcaagtaacctgcttacgtgaagtactcctcactcaccgactatatacgagtcgtgggcaattcatgaagatcagcaataatgaagtttgtgaccacaccacgtagccctgttgtgccatgccaaaactctgaagtcttgcgcgagcgcgaggaaccggccaaaccacgaggaaggtgaacgtaccaaggaacgcccaccaggaatctgttccaagcggcaccaacgcgcgccagacaatgcatattgcgaacaggtgagcctttcccgtggctggcgctgggccgatgccacatgccgacagcccaaacaagtcaccctttctcgggagaagcctgttccgcttatcagctggtgagtctttctggctctgctcccgcccaccctctcactgacaagtgaccagcgaggtgagcaagcaagcaagcaagcaagccagcaagcgagccgatccgtcggtccatcgtccatccatccaccaccgaacccggccggccggccccaaccttcatctgccagcctttaatacgtgctgccgtggcaacacgagtgagtgcagagtagtagaactgagcaagaccccggcccggtcgactgagctgatcagcctgcccaggccatgtgcagccccaacatggcacgttctccctcgctcctctgcgtacacacagaaacctctcctccctcccctctcgcagctagcgtgccggcctgccggtgcccttctgcccatctggcttataaataggcccacacggcaccacggccaccaccaccacccaccagtccaccaccactgctcgcactcactccaccgctgcccacttcttgtttgtattgtatccagactccagaggaagccgagagggcca

SEQ ID NO: 93 - DNA, 3000 bp, Zea mays
tttagcaatatacatatcacgctatattgtgctgctatattgaataatgtatagacgttggtatatattatcatctgatagcgtgtagactggtctcctccaacttttgtattctcatttttagcaatggtggtctattgaaaaggacatgtctaaattaaacttagatgatcaagcaactagacatatataagacaaatcccaacaaagcaaaacgacgaaaggatccattcgtagcagtatggtacaatctttcagaagaaaagacgggcttacgtactaataattatatattgccaccaaatccaccggatgctagacatcataccacatgattagtcataccaattgctttttcttgtattttccaaacttcgcctctagatataaattccaagtttgatctgacgacacttctcctatatatacttttttttatcttactgataaaattgaaaattgtgatgccttgcaacacatttttttgaaagagcaacatttataaggttggatccaacccgagccggaaccaggtgacgttgccgtataggcggtactgatcggtgcgaccccaacgctagtcagttagatcggatggttgattaggccgccaactgattggtttggtcgatatcaaccacgctagaactagactgatcggtattgacccgcacgctaccgaccccaacccgtctataccgaccgtctcttgccatgttacaatttttgattggtttactatataaataaaaaatcctagaaactagcctataaattgggagggttgtttgagtttattcacaccctaactctcaaaattgttcttaccgcttcatatcgcactcctcttactttcgtttcacttcactaaactattgttgctatgtcttactcgagctcagatgttgagatgattgaagacaagatgcttgatatgttgcatcaaactatgatgcatgcgaccataaagctttccttcagatctttaacgaggaggaggtaagggacacaacttcagagttacatcaaacatgattgtgaaggcgtccacgaccgattgatgcaagactactttaacgacccgtgtatctacccttcactttactttctttgaaggtaccacatgtgaaagagtatgtttcttcaaatcttgcttaggttaggtgagcatttttcctatttcactcttagaatcgatgcactcaaccgcaacgatttctccccctaccaaaaatgcaccaccaccctatgtatgctcgcctatagtagtgttgttgactctattgataagtatatcgaaatacaaaaaggttggccttagagtgcctcgaaggatagaacattcctataagggggttatttcatgttttagtgagaagtatagttgtcgtcccactgttatgatcttaggtaacttttagctaacgaggaggagatgggattttctagtatgataggaagtatagattgtatggattagtagtggaggagctatccaattggatgcatattacaatttataagagtaaacataatccccaatcatcatgctcaaggcgattacctcatgtaacgtatggatttggcatgcttttttgcgaggttttgggggtctaacaacgcgtcaacgtgctcaactagtcaccaggcattgttgttcactaacatgcttaaacaagaagcaccaaatgtgaatttcacgataaatagacatgagtacacccaagggaactactttgccgatggaggagctatcccgttggatgtcgttgtttatgaggaccattcccttcccatagactctaaaacagcagatgcctgttgcatgctagaagggcacatggaggatatagggatatcatttggggtctttaaggctcgcttccacattgtcactaggctagatcattcttttttctcaccaagtactcagtgtgaccatgtgtgtatgtattattctgcacaatatgatcattaaggatgagcttgaagaagcatacgatgtggatgattgtgatatagtcgagttctctgttgcagtaccaaccatcactccggagtccagaagcacctatgaactttgcaaccattctttaacgtgaggccacaatccatactagtttagttatgatcagttccaatataatttaataaagtatatctaagacctgcaccataaaaattagattttatttttttaataattatgtatttttcaagtagtatatttttaattgttttaagaaatgtgtatttttttcaaataatgtaatttgtgattctttttaaaagttatttattttctatttttttaattatgtggtcgatgatttttctaatacaatttcatgttttattttaaataaaggtttataaaaagaaagctaatgtgatattgagatgactatacgctgatgaagtctgtgcattaaaacattatggtagataaagattgaccacatcgttgtatgatcggtaggagcctagcaacgctagaaccagcctaagattcgcacaaaaaaacaagtctgttgttgctacggaatgggcatagccgcatagcataattgatttctctcttatcacagacaagggagacacacggacagacacccttttgagctggttgtggtgcagctcactgagcactgtgctgcgcccggcgggcgacgtaatttatcacctcacctcctgcacccgggtgcttacgtggcgtgaaaccaccggctgatcggcgcaggaacggagtaagcgcagcctccattccccgttcctcgctggccgctactactcatccctcgctcttgcggaggcgaggcagaggcttgctcctacctccaataattcccttccgcctctcctcccgtcctctcgcaagcccacaccacacctgcagaaatcacagcggcaggtgcagcaaaaatctccatgcccccgctcggctagatctccgacgagccggccccgcgcggtagcagattcgctcccctatcccgaccg

SEQ ID NO: 94 - DNA, 1667 bp, Zea mays
ttctaggtttatctttgacgttagctttacaacctgctaatgctaaagcaatactagtaccaagtgcgccacatgttgagactgctgctgagtcgtggccagctggtgtttggtcttgtgacgaggagagcggccgacagtgcgcctgcagtggtagctatctcgtcggccgtcaggaacatatctgagtcagtttttcttattatatatgtacggcctggatgatatgttgtggttcttcaactattctatataactaaaaaaatctatttataacgtaacgtatataagtcttgtattttattcattataatatttaagatatgacttatttacgtggattgtatgagtataagtatataaccatatctaaactctgagaactcttcactaaaatatcgtctcttatgtgtgttttttacacttcggtcatttaagagcttgttcgattattcccaatacacatggattggatgagattgaaaaaaattgtgaagaagtttgagctgtttgggattcaaactcattcaatcccgctcaatccacatggattgagagctaaccgaacaagccctaagtgggttgcaagttaggagtagtacgataaaatgcagattatttatcaaccacgagtttattaacacaagtgctgcgtgccaatgatgatgccgaacgcaaaatgagtggagcctgggagtgcacatgcagctgttttgggtccctcgcactcgcacggatgttgtaataaataattctccgacttgtttggtccggctttaattccgcgcatatgcgtaatggaatgttggttttatcaatgggggaggccggtgattcgattttctaggtacaaaaagactcaagaaattgtagatatagttttaaacctttaaatcagttaagaaacattatatatagagaaatttcttttattaaaaatgtatagagattcgtttatagatggttccttcgcagggagcggagctcgtctcttatatatatattttcaattttcaattagctctataaagactcttcaaaagacctctcatagagaaatagattgtgatctaaatgtttacttataatttgatatggctttaaattatttttaattttaaaatgaatagaaatatagatcaattttagtcgattagattgtaaaatttagagttattgttatccttaatctcggtatatttatatttaataagttattgcataaaaacggggaactttctgcatgcctcccctttctggtgctttaagcacacgataaaacttgtggacttgcccttttcctgtccataatcttctcccttttgtgtgtgtaggggtggggggtatgcatgctcgtcatgggttggttatactagtggacaagtcgaagtgtcccaaaagccgcatggttcatgtacctaccaagtactttgcgttgccattatacggcactcacaacaacatgctccattacatacactttgtttatgccgcctcccctccctagtatagataatgatggatattattgatccgccttcatttattttatttgttttatttataatttcgtcggccgggtttaaatcctcggccttccacgcggacactggcatgcaacgccttccacacttgaagcagccaagctaagtgaggtgagcttagcc

SEQ ID NO: 95 - DNA, 3000 bp, Zea mays
ttactcgcgtgtttatttctttattctctctctctcctttcatatgaatgcatcgagcggccagtgttgctattgcagcagcatgtgctgggtgcagatgtcttcacggcgttgaccgggtgcccgaaatcgtgtgagcatttaaggctggttgatgtcgatcgtatgcctgaaatcaaaacaacgacgtgaatagcttggcctgtgagctttgctcctaacttttatatatagaaatgctttctcaccatagtacaccatgattaattatataataattaggttttataatttcttttcccaaattagctacgatgtatagatttacttgtttacttttataactttgtctatattgtctcgatatggaaggtctcaagccatgataaaagaaaagttgaatgatagactcgacgaaacatcattaaacatagtcgttctaatggagacaaaacgtggaaggaatttgttgtgtgtgtaaccctcttagcaatgtgacatatcggaacccaggtatggtgttgaatggccaccgaccggatcgacacctcctcggtcacgcgttgggtcacgatctaggcacagtgtcaagcaagaaaggatcatgacactagttgcttagtgacacactacatcagagttcgagtgcaatgaaaaacatgcaatggtcgtcacatcatcaatgtgttggaatggtaaggaagatagttgacctaattaggattcttgtatgtagttggaatgtagggccgcttacaggtgggttccgatagttagttgagacaatgaccagaagacatgtaaatatgttatgtgtacaggagactaaatgaaagaatcaaaagggaaataatgtggatataatatcgactttaaactctgtatgacgagtgaagtcggctatccaaaagtagacaatgaaggtgcaaggatggatagcaagagccgctaaatttaaagagtatatgtatagaataaattggagacgttttcccttctaataacctagttacatttacgaaacctgactaagtctgttggagttgatcattcaaacgagctcttcaaaacactcacctacgttagcacatgcggttgttataaagatttagtccgtccgctgatgttcccgtttgtccatcctagacgtaacaagtttcgtgcgccatgatgcttgagatagacggaagatcgccgacgttacctaaacacataatagccgacgaccagtcaaccacagatacactatccctgtctgtttgatccagagtcaatccgtgggtctatctatgcaggattgcacgaactgtatgcacacaagcgctctcgttcaacccccgcacggcacaattcaggtcctcttatccgccagccaatggtattttacttttcgtagccgatccaagaaagatgatagcgcgaggaaccgcaattcgaagctccttaccttatccccttctgcgtgataggtgtgtatgtttcatcctcgcacgggcaaacgaacgccacgcatattttcccctacccctccctcgcccatccacaggaaaaaaaaactcgcgtgggccgggcgcacggccggcccatcgcgtcggtcaaacgcagcagaatccctgccgccgcccacgcctcagtcacgcggtcgtcgtgctcccgcggcccgcgccccggcccccgtccacccactgcagccagcagccagcagccagcagtgccgcagcgaatcccagatgggcgggcgcatgagtaaactgcatacaaaaccaggaacaagtccgatctcgcgcccgcggggccactccccgccgccggatgccggatcctacggcccccctcgttcgcggccgcagccacccaccacggaacaagggagggatcaaagagcgtgacctcgaggtagccgcccgctagcatccaacccaacaaccgccactgaaacggtaacgccacatggacccgggcgccagcggctgggagtgatcccaggccacgagcggacgagcattccctgaaccagcccagcccgctgacgactgggcccgttccgtcggggtcaaacgcacacctaccccacggaccagggggggggggggcgggagaggtgagtgactagtggtgagagaggttcttgcacgccagccagccagccacgaccacgagccacgagaaagagagagccaccacgccaccaacaaaaggcaagcgagggactggaaaacaaaagggagacgctcctggcgggtgagcgggcccaccggaggcagcggacgctataaaagaggcctcggcgccccaccgtaaccctcgcctcggtcacgacgcgcagtcgcccattccgcatctcgccctcccgtcccgtccgtccgttctccgattggccgccgcccgcctcgccctcctcgtcaacaaaagcccaccgcaagcgagcgagcgagccaccccgcccgatagccgccgccgccgtcccgcccccacccgactcctcctgaccgccggcgtggggtgcccgggctccacctccggcgacgacaccctccccgccgcgcgcgcccccaccgcctgctccgtttgcgggggtagccggggctccggcctcggcggctttcaaagccccctccctcacaacaggatccaaaatcccgtcctagacttcttctacctccccttccagaacttcctcttttggcatcccggacggtcgatctcgacccccttcgatttcgattcatctcttcttatcgattgatctttcttctagcttatttcgtatactgtcattttgattccttccttcttcccgccgccggtagctaatcccaaatcccaatcgaatcgactcccccctgttcgtcggattctcttcctccgtccgcacccagctaacgccaccgaaaacagaaaatttacccgccgcccaaaaaaaaacagaaaggctaacctccttttttctctctctatctttctctccatctgtggacttctccggttttgtttgacgag

SEQ ID NO: 96 - DNA, 1273 bp, Zea mays
ttaagggcttggaatttcgtttagaatcgagaattgtttatcttactgtcgataattgagaaaaaaatcatatagcatattgacactgttttacacttatgtatacacgctcttataaccttagcctcatgcaaaaacatcgatagctaccattaaccatgtgtttgattgaggagcggagatgaatggaacggctccattcttatttttttgatgtttggtttctaacggaggagagcagagcggctcctggaatctatatatggcaaatatttggtatgctctcgttacatcaaaatgaccggaagcgagcgctctcgcggacgtgagcgctatcctcgtcttcatccactccacactcatatggctcttcaacccaacaataaacggagcggttccgctctattctactcttcaaccaaacaaaaaatggtacgatttcgttctgctcgtcaaacataaaatgaaatagatcaatttctagaaattagaatagagccgttccatactgactcctctaccaaacatggtggtgcgttgggtactcgggcggtcgggcctctcatgccatccctccaggtcttggtgcagtgtgaagtgggcggcgcaaaagagagcggagagacaaagcccgcgaaagctgcaacaatctgcctggcgaagtggacgttgacgtcgacgcctcagttgccgcggaatccacttctttctttatgtgccgcccccccccccccccccccccccccccccccccccctgcgcagcacctgcacttcctcctcctcctcctccatggctgcaccttgcgacctgatccgccatgccctgcgtgtcctttcgaaaacggctgtcgacactgcccctctcgctcgctttccactcgattccagcaggcgtgcgtgcgtgcgtggcccaagtacccaacgcaccaccaggtggggcctctgctccaccccactccactttcactagcaccaacaccaacagcctcgccgccagcagcagccacgcgacacgacgcgacgcgagacgcggagcggtacaaaaggtggactgggtgggtgtggctggttccgtggttcaactcctaccactaccacagcaccagcgacggaccgggcaggcagagaaaaagcagaccagacgagacctctcgcgttccgtcctcctccctgcccctgctgccgttccccttcttcctcagttctcccgcccgctgctgccctccgtccgcgtccagatcccgccaccaaccgatccggcgccctccagc

SEQ ID NO: 97 - DNA, 3000 bp, Zea mays
tggagaggatggggattttgacaatcaagacttgttccacctctatagcttcagaggggataagtaggatagctccagtttgttttgtcagccttgcggctgaactgtggaaagctgagcaccgtggtgttcgatgttcttagcaggttctccttatgggttagccaatttcaactgtgtcttgaagcctgaatgtacctttcatttcaattgctctcacatgtggtgctcatggccttccgaggctgggccgtgttctgttctgaactcgtgatgtgataccagtggattcccgctggtgatccagcgaatcacacgatgacacgaccgagtcagtagctggcgtccgcagttcagacgcccgcccgcccgccggcctgccgcgtgcgcaggcaggcacgacccgcgtacgcgttcgagatgttaacgaccccggccggcggcgacctggtgccagacacggtggcgacgacccactaacctcgcgagtcgcgcacgagagagagacagagacgcccactgactccgcccacctgtactaccataccaccatccagcagcagataggcgggcgccgcgccggcacgcacgtttacggggccccgtcgctgattgctttgacggggtcgggcgggcggcacgtacgccgcaggcgcaggccgtcgctgtccctctctttctccactccagaggtcccccacgccacactgacccccgtcccctttattttcttttttttttccacggcgcgggcggcagcgcacgaatgattccgcggccggatccgttgcgtgatccgccaaccatgccactgcttcgcctgggcccgcacggtcctccgcgccgctggttggtcgcgatttctttaggcgcaagtgtgtgtgtgtcggccgggcggattagcgtctgttaaatccagatccggccggcgcgcggttccgtggcgtggggcagcccgccggccgaaaatcctcacgaaacttggacgctgccggctttgcttgtggctctgcccgtctctaaattctgtacggagactgttaagacaaacaatcattgcatataaaaaaaaggtagcggtagcggtagtaaacgctgtgtcttccattcccaacgggtctacggtaaaaataaatacgtacttagtccgttttgaatgtgtgtctagtactgaagtccaaacatataaattcagtagtataaccagggtttatctctttttgaggaaacatcgtaagaacggccatcttttttttttttttttgcccctaaggacattcgaatgcatggaacacgcggtcgaggaaggaggcggtgtgggagagagaagaaaaaagttctctacgaggcttgatccggttgctctcatgctgagcatagcattccccactaaaagagaaggcgcttttggctgccagtgccaccacccccgcccagaagcttccgttcagattgattgatgaacacagaaagttgggaaaggctgccgtggcgtggcgacgacgagcaaccgtccgatctgcacacctcacccaccacacgcacacgggctggccggcccgaggtgtccagatcaacgagcaccgcttcccacctcacaaatggacaaggacagtgtgcggtgcggcgcccgtgccctggtagtagtagtactcggcgtcgatcgggatggaacggaaaggaaaaaggcccagtggtcctcctcgcccggcgtgtgtggtgtggtggcgcggagcggagcggagccgggggcggcgagggcgcgtcgccacccgtcatgcccacgggacgcaacgcacgtcgcgaccggcgcgtggctgtcggtccacgcgcgcgcgcacctccaccgctttcaatgcgggagcgcgggcggaggaaacggttggtggtggcgacgcgatccaggcgcggcagtcggcaggcggccaagcgaccgcggagcccggccgatgccgacacttggcccgggccccacgatggcctcgcctcgaacgggccgctgccgtctaacgtgccgtcgtcacggcgggctgtcccactccactcggcgttgcgttttactttattattattattaacgtccagcccggcgccgcgccactttacgtggtaaccagtagtacctgtaccactacggacgggctaagcggtgcggcgggcggctttatcggcttgcgcacagctgcctgagccgaccccattggacgtcacgcccgccccgcgccgacgatgcgcggaaagagagagggaggtggcgtgcactgcagtcggtccagtcagtccctcgccctcggcggatggtccacgtgcctgtgcgcgcacgcgggcggcgaggatggttggttgcctggctggctgcgagtgccgcgcagacagcggctcgggacgcacggatcgtgatgcgtccttgcgccgggggggccccacgccgtccgtgactgacgtgctcccgtaacgtgccgccccactgcacccgcggcggctatgatgccttttgtttacggaatactatgggatcatgtctttttacacaccggcaccttgctcaaaccctttttttttacttattcattattccatctggctcttctggactctattttatcaaagcagttttgtgaatcgaagccctccttgtccgagcaattttccgctccaccggggtcacgtcacggcggaaacaaaaacaaaaggcagtcttgtaaagacgaggggcggggcggctgcctgcgcggacaccggacagtcaaagcgctcgtccctgactggtgactgcgccgagttttattccttgttgccgctccaccacccgctctcgccattgccaccctttttaacccccccttcctctcctccaccaccgctataagtccctcctccgctctcctctcccacctcaaatcccagacgccacgccacccaacacatacaaacacacgcacgcgcgcgcgcgcgcctcccgctgttccgcaaaacaaaggaaacgaaggagaggaggcc

SEQ ID NO: 98 - DNA, 3000 bp, Zea mays
tgcgccgcaggctggtgcaaatatgttttgctccatacttatagaattgccccaagggtcattttccttatatatgtatgtgaactttatgcacctgagaaaagatcaactaggcaaactagttagtccattaggtttgtgatggtcgtcaaacaccaaaatcgattataggaaatggttaaggccatttccctttcaatctccccctttttggtgattgatgccaacacaaaccaaagcaaatacaaagtgtagaaatgtagctagtttgcatttgacagatgtgcataagttactttgaaatgaaagtagttctaagcaaatatgattgttttgatatagttaacattttggaccacatttgcaccaattagcttgtttttgcaaatcttttggaaaagtcttttcaaattcttttgcaattagccaatggtataagaatatgattttgaaagcagttttaagttttgaaagattctccccctttttcaaatgtttttcctttggctaaataaaagctcccccctaaaaaagttctccccttagctatcaagagggtttttgcaaatgcaatttttgtaaaaagttttcagaaaatagggtggtggtgcgatccttttgctttggcctattaatttctctccctttggcattaagcgccaaaaaaaagaaaactagaggcctcttacaagaaagataggaatgcaaatacatgaggagggcaaaggggtatacaatacttatgaagttgcagtggaagccttgcctttgcctagtactacatttccctttcaatctaagactaagtagaaatactcttggaagcacattagtcttagctttggcacaagaaaaataagaaatatgcatttgtaccaaatgaaagagatatgacatgatcaaagttataaaatgagcaatgtgtgcaagatttcaatcaaagtttcgagagtctaagatatttagttcatttctaagcttgctaaaagtcttttcatctagtggcttagtgaagatatcgactaattggttatagatgctaacataggtaatttcgatatcccctttggttggtgatctctcagaaagtgatactggatatccccttttgttggtgatctaaaccatcggttttgatggtgtgttaggtctggtgcgatttgtttggtggatttaattgaggttatggttgtgggtgatttggattgggtgggctttgcaaatttaaactggtggattatatagtggtataaattaagagggctaggtgatttaacgatagtaatagagtaaagatggatcaaaatggaaagagttatgctaattgctgatacacaaatgagaggcacctattgcaagtttatacaaagatgaaacaacgtctcgcaatataaaaattcacttcactatttcatagagtaacatgttaattaaatgttgcaacgagtgactaatgaaagttagtaaaatatgtaaagatgaaacaaatcaatagcaacggaggttctacaccgttttcatgacctcataaactaagttgacatggtttcatcaccatgcaactaattttattcccataaaagttattactcttaaatgttatatcatgttgtctaaaaaatataatatgacatattgttaaatgtgtatgataaccgtgaaactactgttaatagtagcctaagagtatgtataataggtgtcttgagctgtgctttcgaatgtgtctatgggattacctgtttgtttacccccatggattatataatctggattatttttggaggattatataatctggattatataatctggattatataatctgagtagtcctgtttgtttacccagattatttgagttgttaataggattcttttgtatgaggaagacaagaatgccctctatatttgtactaggttgaaactcatatatatataaaaaataattcaattgacattggcaaatattgcattagcaatattatcacggaaggcattcatgtcaccttcttcatccccaaattgactagtactaggcgcaaaaacgattcggtggattataatggcaatggtgggtaatttctaggaaacttgaaagggtagtggggaagtgggaaaaaataatctgaaataagcacctcctcacttgcttatggattatcataatccaaggggttagattatataatctgggcaaataagctggactgtttgtttgcctcttaggattatttaatccagattatataatctgggggtaaacaaacagaccctaaatgtaaaaaaacttaagacatgtatcttgacgaaagcacgttgtcctcgttctatgctcgagaaaggagactagttaattgatcaatttaatttataaaatatgttgattggtgtaatgaatatagtaaaacacagattttagacatgtccattgtattatattttattttagtcgtgtgttatatttgaaataccgtacaacagtgccaaaaaattgccagaaaatattagttatttcacaggctcaacatcacctgatctataaagacgccttacgtgtcaatgcctcgatgtcacgtgttcacttgagacggtctcggggcggttagacacagcggcattcacccatccgctcgcggcggcagggacgcgtctgttcccttctgtctagcactaaaaaaagtgtcgtcatttgccagtaattcccctcccaacaaccagaagatcccaaggaaacctcgtacttggcgctgtgccctctccttcctgtcgtcatcgtgtcacggtcggtcgtttgttacaaaaatctcccccaatccaagtaacgcgattaaatccctaatgaatctacgagctgaaatcacgaggccctgccgcctccgccgcctatatgagaccacctacgtagctggctgcgtctgcgcgcgagctcctcccctgtacccctacctctccaccccctcctcgtgccgtccacgcaccaccggcgcgccgcgctgcc

SEQ ID NO: 99 - DNA, 3000 bp, Zea mays
tactgccttactggtatggtgaggcggaggacggaggcgggctgcggtgccagcagattaaacaaaaacacgcagacgccagcgccaccgctccgtagccgcagcctcgccccgctcaagtctcaatcctccagtctcgactggtacccgtctgccaccacagcagcgtcctcgcggtctcgtctcggtcgaccggctctctcttccgcccatgcccacgcccacgctcatgcccaccacccagcagtcttaggccgcaggcccgcagccgcgccgtgcgccctcgccaaggccgtcgcatcgtaccagcggcagcaagtgctccacggaagcaagataagtgcgggcaatttcgtgccacaaaccggttggatagcgggtttgttacctcttcgtttttcatccattatgtcattcttcttcgttatacccgtttaactacagcatcttctcactagaaatcaaacagctgcattatatgtataggaatttagttggggaatggggtacaactgcaacgtgtcagagctgggtccaaggccattaatatatgatgcaggatctatcaataatttaaattgacttattatgcaggttaaattacgggtggttttaaaaaataaaaattgatttattcattgtttatgttggctttcaatcaggtgcaaattcatcgctgcatctccaccactaaagtttggttcctcccaactaaagattagtccatgtcgcatcaaatattaaaataataaatacgagtattaaatattgtctaactataaaacttattattatacataaaagaataaaagacgagacaaacttattaaacctaattaaacaaacatttgatgtaagggagctctttgtcttagcaaatccttggtgttgagcaaatccttgtctaattgtatatagtgaaacaagcaaaaaaactaactcttgtcataaatcacctaaatctttaatttaaatagcttggctgttctagatcgaactaacggtcctaccaactgttttaccttttacataaatattctacttgcactatgtttaaattgattgcttataaaaatataatattcttatcatgatatttttcacgcgcgcgtagcgcgctcaagctactagtataatataagcacaatagaccaataaaattttaggcatatcacaatatacccttcccaaatactaagtatataagcacacaacatctccaaataaatctatctttaactccaatcattcatcctgtcatctacacactttagctaactttaaaaatatgttgtttttgttaaacttcggtctatttggttaagaaaccaaatcgaaaaaaaggaaaccggatttttcggtcctgtcttgatacatatttcatttctaggtttttaggaattgaattttctaaaaaaaaacaagtaaacgaaccgaatccccaaacctatctagactagtggcaaaatttgttctacacatttttttgcaattatcgtacaattaaactactaaaaggcataaaaattatataaatattttattatttactctattattattattaaaatttaagtgtgtacgatgtaatgcacgggtagttgtttcgttttgtgcatgtctgccttattttgttgtgttgcttgctaaatgattttcttcatacacttttgtattaacagatccagattttagtgagaaaatattctccaacaactgttttagttatatttctaaatattttcattcttttttttatcagataaaaataaagaacgagactaaagactcctttggaacacatgaatttgggaggggggaaatcatacaaaaatttcaaaggaattaattcattttcacggaaaaacacatgaaacatgaaagattctcacgttccaaagagggtctcactttctagaataagcatgagatataaacaaattattagagggtgaaaaatatagaacactttttattcaaattactctcgaaatgaggattgaaagagatgctctatgtaagctttattatttggcccaacggatcactaaccaaagtgggaaaagggagaaatatatgtatggtcatccaactattgtgtaagtttgattttggcaattaaactcgaaatccacaaatgttcgaccatccaactattaacactgtttatatttggcccttcggatgttttgatggtttggaagttttgaaattcaggataagagaaattaaacaaagggattacgaatgatcttcaataggaaattttcctactcgtcgatatttacaacttgagaacatatccggcgcatatgaaaatttggtgtacatgatacatctggagtggtggagtgtagcgatggaagacattatttataaaatataacaagcaacaagagatgatagatctaaaatgaatggtgatgatttaatatgtgcaacatatacactaatctttcatatacataagatatgttctttgagttcgtttggataattaaaaaaacaaaatatacaatataactattttaagcataattttagatagtaaaatggtttcgaataaaaagttatcgattaaaagttgtaggtctcactaaaatcaataactccagttaggttatttttctatatgggttcattcaaataatttaaagattttgcagtagtcgctgtttgcacattttccacagttttctgaagagagatcctagaggcttcaccgaaattgtgctccaaagactcgaaggtcagagctgaaaggcaatcatcaaagactcgaagtttgccgagcttgtgctccaagcagagacctttggagcaaagcgcgccacgatgcacagacaacctcgtccacacacaaagtctcttctgccgcttcataaatcccacgctcggctcttgttgtcaggcaaagcgccactactcacagacagtcacagacacatccaacgagcccgaccgccagagctcgccgccgtcctccgcagacaatccacc

SEQ ID NO: 100 - DNA, 3000 bp, Zea mays
gtttggaagtaaagtatttcaaaaccatagttatacaataccacggttttaaaatgttacgacacaactgcaatattttttacattactctaactaatatgtgtctggagacaaagtatctcaaattatagtatttcgtatacatttgccaggctagtcatagaaaaaaatgagttttaaatactgatataatgttatgtttgaactcagtaactatgtaatgttatgaatagtgatgtacttatgtttgactgatagaattagaagtagaatttttattattaattatcgtgatataatgttattcatttgtagcttgcttgtatagaacataatatatgtggctaaccagatgttcattttttggtttaaactgaaaaccaaacaccgaactattcggttttttttgttttcgcgacacaatggtcggttgggagtttttaaaattcaaagtttataaaactgaagaaaattaaaccgaacgttcggtttaaatcgaatgtccatacctacaagtgatacatgttcacactagtgctagataaccttgcttgtaaagggcaaggactcttgtgaccaaggctacggatgaatgttctcttgtccaatgtagtagccaaggccccattgtctattgtctataagaaagatgcgcttttcaagatttaaggtgtctttggttgtattttgagctgcttttgcttttaaaaagtcgaaagccaaccaaaggagtatgaactaaagatgtataaagtagaagctactttttcagaactagttattttagataatactacctccgttctcgaatagttatcgtctgctagttcatttttaaactaaaacgtgataaataaaaaagaacggagggagtacctttttgagagcaacttaacctttgacctttttttcaaatataaaaaaatatagagttgtttcacctcaagggcgatactaaaggttactattggatccaccaatagtaaaggttactattggatccaccaactagagctaaaggttccttctaggccaatctacgacactagccattagaccctggactaaagagaggattagtctcgatgcaactgatgactaaatcctaaaactaaagcttgattctctactagtgtccaataaaagatttaagtggtaaatacggagtattacgtagaccaagagacctacttgcttaaccgtcgttgccgtattcctatgctcaagctcaatttttttaaaaaaaatatatatatttacccttacatagtccacgcatgaaacgaaccacgcggaaaccatgcgtcagttgacaggccaccaagagctggacgagagttaaaaaccttgaccgtaaacagcccgatccaattatttggaaatgccactgaaacgtaaaagaaaaggacaacctgtagcatgcattcgtttcaaggggaaaataatctgtagcatgcacatggtcaccctttgtgtcttccctctcaaagaatagtcgccgcccactacgaagtatgctctacccaccgcgtgtgacagtagtgctgctaccacccgctttgaaaaaatcggaaaagagtagcggttcgtgcattagatggatgttgcctaggagcacctgctctccaccgttttttttttttttgaaagaaatggaaatacaatacttcattcgtccaaaattaaaggctgaagcgtggaatcttcgcggtacgcttatctgaacttgggatcgtcaatgagtgtttatcacatcaaattttaatgatcacaatttggttggccactgctgtttgtgaaagttccacatattgctgcgccagatccggagcgcctttctttccttggaagttcgttctgcaggtgcagaatccggacagaaatcgcaacagaacacctctactactgctatacatcctataggccacagctgagacggactcgtgagtcatgagtgctgatgtgacgaagccccccgtttgtttcggcttttcgcagcttctagccaccaaaagctgctgcggactgccaaacactcagcttttcagtcagtttctataaaatttgtttgggtaaaaaccattcaaaatcaacataaacatataatcggttgagtcgtcgcaatagtaggaatccgtcactttatagatcctgagccccatagacaactttatcttcctctgcacgtagtcataatgatactcaaattctctacacagccagattctcaccacagctatattctcgaaaaagctggtcagaaaaagctgaaccaaacaggcccgaagtggactcgtcatttcgagccatttcctgtgacatttcgcacgcctgcagttgcagcatctccaatctccaagtggttgcgttgcgttgcgtgtgtgtaaggtccgggcgggcgacggaccggaccaactcgacactgacggagggaggactaggcagtagctcgcgtccacacacacgggggctcccctaccaaccccgtcgcactcagccagtgaccagaccacccaccttggggcgcaaccgcatctggtgtggtgcgcccgtcgtccggcgccgggtcagtgtctcctatcaccaggcggacggcaggcaggaggccacggccgcgcaacgcaagctgccgcgctggccactggcgtggcgcgcatcggcacatggttggccggcccatccaagggcgagggaggcgtcgcggagtcagctcagcccgccaacaacctacccaccccgattgccatgccatgccagtctctggcccccaacaacctccctctcccaccggtggccacgctatttaagcccgtgctcccccccaccgttctcctcaggaagagcctagctagctttccccagctcttcttccacagcactgtctgtctgtctgtctcgcaattagctgtactaatccgctagtggcactgctgctactctcgtgtactcccagctatctcctctctatactcttgtacgtacgcacgtgtcgcaaccgca

SEQ ID NO: 101 - DNA, 3000 bp, Zea mays
gtacccacgtggccatctcttagtcgtgtggtaaaggtgttgtgtgtgggaccaagacatgactcgccccagcctcgggcgactactctgggtccacaacagcgcctgaccccaccacatgggcgggtccggagccgccacgtgtccagagaaagtggtagaccccaaggcctcaacagtgagtccggacccccatgggagagtgtcggacccctggatatacagtccggacctccaagattggtccaggacctccacgtgtgcaagccagacccctagaatgggatctggacccccccccctcccccgtatggggtctaggacgcccacagtggggtcccaaggttccagggcagaacatactcgtgccttggtcaggacccaagcgggggtccgatgccaacatgtgtctagacctgatctggttatcacgtacactcctccccgctcaggcggagacccgatgctgccacgtggcatactacgcacggtattagccaacgggtggaacctggcatgacgcctctgggctacgcgcgccttcgcattcattacggataagacgtgcgcctgtccattccactgactggcagcgtgcccagtccacaatacgtgggccgcgcaattactcgcacgttactatatcgagggcaatcactcactattactcgtgcgggttactgcctatcaatgatgcatggactgcggtcatcatgactctcgctgattgctcatatacgttactaaggcggaggatccttgtgtactgtcagcatttactattcacataatgtattcctactattatgcttctgggcccacatgtcggggctcagcattcttgtatgtgcctcccttaaactataaaagggaaggcacacagcgttacaaggcacggacgctcaagttcgcacacaagctctcaaccacacagacacaggtttgacacatactcaatgctacatacacacagtggaggtagggtattacgctccgacgggcctgaaccactctaatccctcgtgtcctcgtgtgttcatcccaaatccacataacaggtaaaacgcttaggccccctcctcatcttaggattagggcgggtgcattccgtcacccggccggtgaatttctcccaccgacagatactttggcttgttaataaactagtgatataagaggctaattggcgagacattggtttataaggactccattatatagctatctagatattaacttaaattttcctttgtagttatatacgatgtattgtaacttgtgaaaaatgtttggtgcgtgtgagaaatgacaatgtggtattggacctatagtgacaattgacaatccactatcgtgtgatccggcactagtgtcatgagtataattgttgggttgttgtctaaactggtagtatcactcaggataccactaacggtttaagatgatatctggtaatgatatgtataaataatattatcagtttctgatatgaaccaactatgatgtgtttatatcactattgggttatccatgtagcactggtggatcaccctatcactataaattaaccgttgacatagatttcagcgatgatgggatttctatccgacagtctggatgagtctggatgtgggtagatgtgagtctgaatgtgtgtagatgagcaagatgccaatgataaagtgcaattgttgaaaaaatagcttacctgatatggctctagccaaataagctctaattagtctaaacccctttagaacaaaagaatattttttgaatcctacatttttctatattttaaccaattcatgtgaaattcctatatcatccctatgttccaaagaggtccctagtgagtccctattccactataagagtatctctaactgtgatttaaatcagtgtcgtagtttaaaatatagggctcaaatcataaaaacagcttcaatagtgtcttattttatatttttcataaaaaaataatatggggcacaccataaagtgaccctaatatattacaccctaggttagcgtcatatccttgttttctacatcattctctacattttatttcccaataatacaatttacttcctaagatggatgatttagggcctaactgttgaagtacaatttgttttgttatgccttaacatgttaaattatgtattgttttaatttttgagggactattttgtggcacattgttggagatgctctttacctgtggcataaatcactgccacgtcttgaaatatagacttaatcattaaaaacaatcataacaatgccctattttacaaaattttatcaaaaaaatttagggcacaccataaagggacctaaatatactacatcccatattagtgtcatatctttattttgtacatcattcttaacattttttctaacaatataatttacttcctaaaatatataatttaaggttgaaactcaatttgtttttattgcattaaatatattaaatgatatagtattttaatttttggaaatgttattttttgagagacgagatactttagtaaaggtaacaatgagacgagaagtaatataaatatattgaaaattgacatgagttgtcatcggccgtcatgagctgaggatcctctccatttcgcacggagacggagtcccaggcacccagccaacctttttctactcttctggcagtctctgtctcccacacattctctctctaaactcccatgtcagcccgtctttatcgattaaggtcactttaccactagttaaagacgagcgccgcgtgcagacggagtggtagaaaaagctggatgtccatcgccttgcttccaggttttctccaaccatgtccaccaacacactgatctagtactaggactagtactagatcgatcctgcctgcctgcctgcttgtaacagcaacagcagcagaagtggcgcactgtgctttgcggtggcggaggctgcgagagaggaggaacttgcaagccgacttcc

SEQ ID NO: 102 - DNA, 3000 bp, Zea mays
ggtggactctttttcaacttatatatttataggtcttttggtcaagataaaatgtaatatttgttattattaatttaatatatggtatgtggatcacatatacgctttgatattaatttttaaagagtctaccacattggcttgccattgattcctcgcatatcgtcctagagtctagcccatctaactaatataattaaatatgattgtatgttgttgcaacgcacaaacattgtatcagcccagttcaatatgtataattattttgcgatgaaaagtataatataattgtcgtgtaattaaattaatttaaattatttattttgtcaatatacctgattttaagctcttatttagcttatgctaacatatatatgtatataattcgtcatttatattagataattttcacttttatatcgctagactacacacctgttttcgctttgttttccggcgagctcaccaaatttcgcgaacgagaatcactggccaatccagattaaatcaacgattttaacgccgcccttgttacggggccgcaataaaagaaaagccgacccagattcaccacagaaattagaaaagtggaattgacagcgatcccagcggtggaatctgcacgcaatccgaggagattagcgcatcacggcggaccagccggctggggcacagattccgctgccgcagctcagtctcagtgcgcgtcagattccaacttgcgtggtcgcttgtgtggattccagcacgagactaggtgctgggctgggtcggtcggttggtcacctcagaatcgcacgcgcccgctgatcttctgcgccagcgactctggattccggtctgtgcgccggctgccgccgccagccaattggagcggcttttactcgcaggtcgcagcactagttagctttgagtagagagtaatttaggttgactgttgtttatcgcatgataacttgacggtatgtgtatgtggtcaacgtactttagtggatcctaagctgtcgggggtaaattcatgcgaaaaaaacgcttgtactgacctcagccagtgagtccctttccttccattgacttgttttgctcgacagacggccaagggccaaattttctttttcacggctgagctcccacggcacatggtttaagcgaaatgtcaggcaagacatggagaaactaaacaccacctgtgatagcttgagagagccggctaatgcctttttacggcgtttcccaaaataaactttcaacctaagtacattcggtgagattaaaaaaaaagaaattatctccaacagcctgtaaccctaccttcaaaggagctgcgtgccgacgcgggcgcatgtccacatccactgtatggatggcaggcgggagatgcagctgcacctgcactgtactacctcgacaagtccacgggcacgggcttcggaacgcggggctcccttgctcctacctctgcggcggcgacaccgcgggcaccgtcacggtcttctacttacctaccttgcttttgttgttctgttctttgcctcgctcttgccggtgcgctgtaatctgactgctggccgactcgtggccgtggccgtggccggagaagagcccgggacgcgatgctccggcgaaatatctattatttttatctcctttgaatcgatagcaaaatagcttttttatctcgattattttaaaaggtacaaaaccaaaagtcaaaaatagatctaaagtgcttcaaaaatatattacttaaaagtaaccaccaaacaacccatttactagtttttttttagcttttgaactgaaaaataaacagcccaaaacctgactaaacggagccttttgagatgtttgaatgaacgaatgaaccggatataatagttagctaactaaaaaatgtcaatggacttagctaaaagtagctaataattggatatgctcttaggcatgtgataagtactctcttagagttagccttaagctcttaactggggtgtttggatatgtctagctaaaagtagctaataacagaagtagaactattaactaagttgttaggatgttcccatgtaatttagcagctaactattatctctaatctatttacacattgacattactctgcccaaagcaactattttttaacgtttggcaatttattttagtcaatctaaacttagcctaggtgttagaatataacacttgtatgcagtattattaggttatacttgtaacaagagcgtgtatatgagcgcgtaaagtaccattttacactatatattgtataatctacaaaaagatgagtttgaagtagatagttagataggcgatgggatatggaagctggtggagatagtctaaaatgttcagtttttttatcaaactatgcttatactccagccgtctaaaaatagtagtcgttttagctctaaattgttatgtctatattcatgaatatagatgattataaacctagacatatatacaacacatgtataacacatgtattaattattgtatacatttaataatataatcttccgaaatcttgaatgacgctaactcgatttactcacatggcctaatattatacccatttatacactaaagatcgcatccctttaaaataaggattcgctccggaccgggccggaccggccagtggggcggctgtggcctgtgggagccaggcggccgctcccggacttgagattctcaaaactcagctgaattccccctggcgtccggcgggccacaggagcacaacccacaggccacaaccacagcacagcagcacgagaagggcagaccgcagacgccagacgcctataaatacccccgccttcccacccagcattctccatcctcacatcgtccacagaatttcacgcatcgcacggggaacaccgatcgatcgatccctcgagaagcagagacaagtagcccgcccgcccgcccgcacacatagagacagagagaatcaagccgccgccgaccagtgac

SEQ ID NO: 103 - DNA, 3000 bp, Zea mays
ggtatacgccaaacctccgaagtagtccaacccacgaagaaaggagggtttccacatgtcatcgttgccgagccacatccgcaaacgaagccgctctggcttcacgctgcaagcccacacctccacccgcctaccgggcgtcgagaagcgaaagcatcaaccaagaggcgacgctgtggtcaaggcgaacttcaaaagcgacgccttcaggaagggagtgacatcggggacgccactgtcacaggttcgagaaggaccagacttttgcccatgggagacagtgctggaggaagcgacaccctcaacaggggaagcggcgcccataggcgtcaccgaggcgatcgccccccaacacaacgtcaggtcaagacgccggtcatagaaagcaaccttcgttgtcgctgacagctgacaccacacacaaaccatccagaggggcagcggcgtgtcggttgtcgtaacagccacaaagatgtgtcacccgctacccctctagctgggcacacagaaaccgagcaacatgaacccacaaacaacacacagctacgcggtgccacgtgctggcagccgccgcgaccctgacaaacgtggccaccgaagcaagcagacgccaggcccgagcgcagaggcatgttcattgtgcagtagcccccgcaggggcgcattggcacgttcgccgtgcagtagcccccgcaggggcaaaagcataggcgtgcaacggcgtcataacataggaggccgaggcgggaacaaggcgacagcaaggccccgcacgcgtagccgccgagttgcgccagccacacgtaggaggctaggagccctaagtcagcagcgaaccatggtggcccggctgaaagggaaatggccttaaaaccatttcttattttttggtgcttgatgaccatcacaaccattcagactgaccagtttggctagtctctgattcacaggttcataagatcaatagttcagtttctaagtcagaatctgctcagttccaatcaaataggggtaatacatggaatagatgaactaccaatagttctactctttggacaaattcttaataccccgaggaaccttttcaacacgtctagaaaggtttggaaagctcaaaatcaacataccactattgtggagctagtactgggcaaaagaagatatatgagtgaaagaatcaaaatgcaaagagggttggactaaggaaatgaggatgcaacacctcaatagaagacataaaaataagcaaaaagatccaaggctcaagatcataagaagcccaaaagagtcagcaaagaaatccaacaacagggcaagacaggctccagcctgcggcgcaccggacagtgtccggtgcccaggctggcgcgccccatgaactggccgctctcgggataacaaagagctccgtggctaaaattcaccaaactgtccggtgagtctagggtcaacgatcacttcaccaacggtcgactgctacgcggtcagaaaggacagaagggcagaagcggtcagagaaagttattcgcaccggactgtccggtgtgccaccggactgttcggtgcgtcacagggcagacgaatccaacggtcgattgacgtggcacgcaccggacaataaacagtgcaatgtccggtgcgcatgtaggatctaggacaccggctagagggggtgaatagacgtttttgactaaaataaaatacactagacaaatttaatcaaaacaacaagagatgtaaatatttctagccttgatggaacaacaaaatgtaatgagcaatttaatctattgtcacaaagataatcaatatataagttaccataatagcgtttaccgatcgtttccgaccgttttcatccctagtgctatatatgcatgtttatgtgtgagactgaacataagcatcccttttaaaactagtttggaaacttaaatctcattcgtgattggaggagatagaaatgaaagtgaactaatttctctatcaatcctctcctagacatcacaaagccataatcatgattgttaagctcaatcattaaccacgataaagccgccattaataagcctaaagtaactaaactggtccatctgccgttagtcgtacactatgtcatggtggcctggtccagtctagtttcttatgccctatttgaaacctctaaaaacaataattagttattataattagttgttgaggttccaaacactctcagctaatatcttagctatttttttagctaactcacaactaaccaacagttcattagttggcttaactcaactaataatttattagctgactaactattatttctatttctatgtgttttaagcaaagccttatatgtcgcatcgcacaatattcattacacttactctctctattttaaattataaaacaatttgattttttgatataatgtactatctttgtactaaaataatagtagttttaaggaattagtgggttcatataattcttgattcggaaaggagggagtattataagtgcatagcaaaagttataatttttggagaaagaactaaaatatcttacaatctaaatggtgcgactggtattaattttaattgaatctgatttggctggatatacacatacagtgcaataaccaaaacctgattttgccccctgcatcttttaaaactcaatgaattgctgcctaacagtaccataacgtatagacgctacagttagcatgaagatatcatcccaacgttacaatctgtagcctggtcacctgaccgtggaatgggcccgattcataccccctcctccatccaccgcccgttccagcgcgcccgcggccggcggctcacagccgtccacagcatcgagagtctcccagccacagaagatcctggcatcgcctataaattgcccatcacctcatgttcccttccccgcaccgctctgaaaaccattcccaggcccgcccgacttcctgcccttgtacaacgcacggtccccgtccca

SEQ ID NO: 104 - DNA, 3000 bp, Zea mays
gcaagcagcacttgagggtcctgcttggtctgcgtgtacgcgtcaatcttgttcattccctatcatacatcattctacgtcatgagataaatcgttagattaaagataagaacatgcagtgaaaactacctcaatgaatttctgtatatgaactctcccttgggtgatatcacaattctttactctagcaaaaaatatctagaaaccttcgatgaatggtgtgtttgcaatgtccagcaatttcgtcggcctgccatgcgttctgcaatcgaggaactctttcccccagtcaagaatggagaaggtatagctagccagtttattctttagattcgcggtagcttgcccaccttctttgcatctcattcacttgtgtggtcactgctgtagctgctcaaggcgatactagagaaaaagacacccacaaaatcccagcacgatggcaacaaggaggcaccagctggactggaagctatacgagaaagatatcaacgaatgccttgaaaatgcgctgcgtgaccttgatgacgatggcgcaaagtgggtcaaaaccgattcatattgtcagtactataaatcggtagcgaaattgcatgtcgaatctcccaaatactccagataacatatggaatccaccaccatcccgaatatcccaaatacttcagatcaaagaagagcaagaaccaaatcaagaaccctaacacgatataagagacagggaggataaagattgccaacgagaaagtgtccgtcagaggagattgacgccggagtgaagcatctcgtgtccttgacaccgtcgcggccacagtcgccacagccgccgcttgcccttcgcgcgcgtcgccccgtggctccttcacgtgcgctcgacgagaatgttttcatccagtagaggtcgggcgtggttacctggcgagggtgacgaggaaaggcagggttcgtccgggatgcagcccacacgtgaattaatcgaacacatattttcttgtgaccgggtttcaatccatataggagcgatccacggggatctggccatgatccggaccgggaacaagctcaccgaacatggcctaatgtgtaatgacccacaccacactcgatcacttttgagctagctaggccggcgcccgcgtgcacgctacgctggccgctcctcgatccatcggtccatcaccaatgcacgtgacgctcgcgcgcgcgttgactttcacgcaacgctagcggtagcggtagcgttagctggtgccgaatcgccaacgccaaccgtcgtcgtcggccctgcgcacgggcgcgcgccgtccgccgtccacctctgcccgctagctgcgctaataataaggccggcagcactgctgatttctcgtgaactcgtgagacacggcacgagcacgacgctataaatgccgaccgccgcctgctccgtttcccgtggacaggcacaagcaaccagagccagagctcgacgagccgccctccagtcggccggccgtccggcgatatatctccccgaccgtcgtgcctgtgcgagagttgacacctatatatagaggcatggagacggtggcggcgagttacggcggcggcggcgaaaagagggagctgcagcagcagaacaagcaggcgggcgggtgcgggcaccaccaccacttccagatgccgttgcactacccgaggtacaggcgggaggactacgagggcatgcccgagtggcagctcgaccgcctcctctccgagtacggcctgcccgtcgccggcggctccgtccagcagaagcgcgccttcgccatgggcgccttcctctgggacgccggcgacaactaatgtctaattaacatgtagcagcagtcagcagagttaaaagtacgagctagttagcatgtatgtatatgaaccaatgctgtatatctagtacagtacgtctctgtatatgtatgtatgtacgcggctggcttattgccttgaaaaataatcggatatttgcatattggttatacatggacgtgtgtaccactcactaatcatgcgtgcttctttcaggcatccttcctttagaacaaaagccatgtgctttttcctgtgtttccttaactaatttcgtatagtgaaattcatgcgttcaaagggcactcatgctttagctttgggtgatcagcacgcaaagagagggcacatctcatggtccgacgacgacgcacaacgccaaagcattccggcgcgcgtccaggaacagagagacgcatgtactagtagtctagtacccgtaccgcagggcattgaccacagaggaaaataaaaaggtagaagcaggcaggcaacaccgacgacgcaccaccgacggccacgaaagcaaagcaaagcaaagtcgtcgtcgtcgtccgatccaccgtaccgacgaccgaccatcgccgtcgctggcgctagtgcacgctgcctgtgtcttacgtgtgtgaacgaacaagcatgcagctatagcattaatttcgcagcttgcggcgcgatggccgtccgtcgtggcctcacctggagccaccatgcgtttgcggccgcgaggtggacgacgtcgccacgggattctgaatactacctgatgacgagacgtacgaggttagatagtagtaatagcagtctcttgctggtagcaggcaggatcaggaccagcgtacagtgggccccatagaacagtcacagtcacacacgtaggggggcctgtatggctgtatctattgctgtcagtcacttttgcggagagggagagacgcgcacgccagcagcgtcacaaaaagcgagcgcgcgccaccgcttccgctcccccgagaatatccatatccattatcacagtgtctcctactatttctttttactcactgtggtggactcgtctctatatattgcaagggtaatgacacttgtctgactcccctcacatacagatacagtacagttcacacactctcctgtctcctatccatccagccaccgaagctagccaagaccaag

SEQ ID NO: 105 - DNA, 3000 bp, Zea mays
gatcgtatagtttaaaattcatggaccactttaacatttaagactccaaaccggtggccgttaacgaataaaaaaactgctactaatttggtagaccatacaaatgagcaaatatgctctaaagtttaaaaactgtagaccaagatcaaatagagcctaaatggaactttcttaattactactttctctattttaaatcgcaaatcactcgatctctatcctagattaaatgtaacagattcatataaaaacacactaatacgtgcaccatcaaattatgttttccccctgtatatttgattatttaaacatgtagatgttagcacatttttctatgaaaactatcagagttagataacttgtcataaagctaaagtgacctacgatactaaatggagggagtggtacgactgatctgaaatttaaatatattcccagctaaggtgcgcacctggttctgattcttctgagaggccaagttgatgccctcgtttgtagatctagaggcttggtcaattcctccctgcatattcggattcggacattaccaagaagaattgcacatggacatggtggggcgaaatttcacatctcaatcatcattgcttcgattcccagcttacgatcgttgacctgcctgcctagctgcctcgccaactacaacgtgttccaaaagggttaagagagaggagccaaactgatttcattgctacgtatacggtttttatgtatcgtacatgtagatgttgcttaaataagatgtatatttaaacacgattatatttttttttaattattgatatgtgtgtatatattgataataactattctttatataacgcaaacatacataaattagagttgaaacgttttatgtgaagcaaccatgcgcttgttggaaggaggtgacacacgaagaagctaatgtttaaattatacttcttttattttttttatttgttgcagtttagtttaaaaataaactagtcgataacaaatattcaataatggatatagtaatagagttatatgtcgaataagggtcatgtgaaaaagtagtttgcttcaatatgaaaaaggcatacgacaatcggtctcacgagcaagcacacggtgcacgcacaatttgtgatcccatgcacgggtgcgtgacgccgcaaaggagatgcgtgggaccggcgcacgcagcagcgggcgtggctgcacgcacggcacgtctgtaactgcaacagcgaggtctgtaatggcgtcacgtcgggcaacggcgaatgtggcggcacgagaaggatgcgtggtgagagcgacgccaaaccacggtgccggcgtgtgccaatccaacgaacccaacacgcagaatacatgatgcgaaaggcgattaatttcttttcttttttttttcgtttcagttgccgaccgtattctgggcctgtttggttcagcttttttctgaccagcttttctgaaaatctagctgtggggagaatctggctgtgcgaagaatctgagtatcattacgattacgtgtggaggaagataaagttgtttacagggctcaggatctagaaagtgacggattcctactattacaacgactcaaccgattatgtgtttatgttgattttgaatggtttttgtcccaacgaattttatagaaactggctgaaaagctgagcgtttggcagtccgcagcagcttttggtgaccagaagctgccagaagccgaaacaaacagggcctatacgtgacgctctggagtgtgttttccagacacgcatggttctcttctctggcatcactagcaccggtgaccaaacttgccgtacaaaaaacggggctgaaggaaatcaccattgccgctcacccaaataaagactgttccgttcattgccggttgggtgtggttcaaacgcctaatgatcggcctcaagttgccgatgggttcattctcctggctgagaaaaaaaaaatatacatagtcgctctagcatattcgatgtgcatctcctcgtctgccagcctcgagcaccaaacaccggcgcaacaaacgagaacccgccacgtgtgctaccaccgacaccaagccgtggagcaggaccatacgcgccagtacgtggcgctcggccagtggtcaaaggctctgcggcagcagcaccccgccgcatccgatcccattccacggaacgcccgtgcaattatggcaccgcgtggagtccgcagggagcaggtcgctggtccactggccagtgactcactctccacgctctgccactgccaccatcatcgctgacacgctgctgtaggaaaaggggggcttctcgccggcggagtaggcgcgaagcatagtaatccgtaatcaggaatcactcactcctccaaaaattacggcgacactgcgatgaaactgagggttaggggggcgctaatcaaatgcggcgaggccgcgtcgctataaaagagctcctcgcgcctcctttccacctccccgccccaccaaacactcccgcagacccacagccccgcccgtccccgtccgtccacagccagctccgcctcccatccagcgcccgtccacagccgccgcagttccagtgagatcgagcgaggtaagcttagatctgagcgatttctctcgcgcgtcgcaggtaaagttcactcgacttcgactctctcatcctcttctgttcttcctggttccgtcttcttcctcgagcagacagcgagagacccgtggccttttagatcccgggcttcagatctgctgtttcttcttcggtttggttctagttctagcagtgtactagtactagtcgttaggttggtagccaagagaggttctttttccacacctcccttgcgcaagtgagtcctgtcctgagtggatctacccaccactgccatctgtttttactgtggctgttgggttccgccagtttcttcgtttgttcttggtttgctagagagagaggaaaaaaaacaaaaaaacaaaaaaaaacagtctag

SEQ ID NO: 106 - DNA, 3000 bp, Zea mays
gagatgacacagtggtttatcccatggttcggccaagaccaatgcttgcctactccacgttgtggcgtcccaacggacgagagttgcactcaactcctctcaagtgatccaatgatcaacttgaataccacgatgttttgcttttcttttcttatcccgttcgcgaggaatctccacaacttggagcctctcgcccttacacttttgatgttcacaaagaatcacggagtaagggagggatgagcaactcacacaagactcacaaatcagagcaacaacacgcacacaagtcgcaacaagagctcgtaacacaacccaatgagttcacaactccacaagagctctatatgctatcacaaagaaacaaatgcgcggaatcgatgacttggtgcttaggaatgttgtaagtatacttggtgtactcctccatgcgcctaggggtcccttttatagccccaaggcagctaggagccgttgagagcaatctaggaaggctgatcttgccttctgtcgactggcgcaccggactgtccggtgcccgatttccttccacaaatggcgcagtcgaccgttggcagcctgagagccgttggcgcaccggacatgtccggtgcacaccagacagtccggtgcccccttctagccgttggctcggccacgtgtcccgcgcagatcgcgcggccgaccgttggccctgccgaccgttggctcaccggacagtccggtgcacaccggacagtccggtgaattatagccgtacgtcgacgatgaattcccgagagcgatgagttcgcctgtgaacggcccaccggacagtccggtgcaccaccggacagtccggtgcaccaccggacagtccggtgaattatagccgtacaccgccgtcgaagtcccgagagcagccactttgctcgagccagcctggcgcaccggacactgtccggtgcaccaccggacagtccggtgcacccagattgagcagtctttggctgctcgagccatctcttctccaactcgattttttctgtttccagcacttaaacacaatacattagtccataaaacaatgtactaagtctgagaaacatacctttatccttgatttgtactttgtccacctttttacacttaggcactcgtgttggacactaaaccaccaaaatacttagaaatggcccaagggcacatttccctttcagtatggtggagcgagccagatgggacaccggtcttgttccccgtagcctgagtcagctcggggtagggtaatgatggcgcctcctgacgacgtggtcggtccgtgccctaggttgggtgaggtggaggctcctccgaggtcgaggtcgagtctgtcttccaaggtcgaggtcgagtccgggcccccgggtcggacaaggcggagaccgtcggctgaggccggggctgagtccgagccctggggtcgggcgaagcggagttcgtcgtccttcggggctgagcccgagtccaagcccttgggtcgggcagagcggagttcgtcgtcttccggggctgagcccgtgtccgagccatggggtcgggcgaagcggagttcgtcgtcttccggggctgagcccgtgtccgagcaatggggtcgggcggagcggaattcgtcgtcttccggggctgagcccgtgtccgagccctggggtcgggctaagcggagttcgtcgtcttccggggctgagcccgtgtccgagcccctggggtcgggcgaagcggagtttcctatgacgtctgaggccagacttggctgctgtcagcctcactctgtcgagtagctcagcagtcggagcggagcaggcggcgccgtcctcttgtcagaccggtcagtggagcagcgaagtgactgcggtcacttcggctttgtcgactggagggcgtgcgtcaggataaaggtgtcagtccacctttgcattaaatgcccctgcgatttggtcggttggcgtggcgatatggccaaggttgcttcttggtgaagactgggcctcgggcgagccgaaggtgtgtccgttgctggagggcgagacgtagatcctccggggtcggctgcccttgcttaagactgggctcgggcgaggcatgatcgcatccctcgaatggaccgatccttgacttaatcgcaccaatcaggcctttgcagctttgtgctgatgggggttaccagctgagattgaggagccttgagggtacccctaattatggtccccgataagcaccaactatttcccccaaaacacagatgatctttgcaagtgtccttcaatgtataaaataatttaatgaagtatatcgatgatctgcaccatagaaattagattttattttacaaattatattgcttcttatttgtttgagtcatataaaattttgttatttttattaattgtgtatttttatagttgcttaatgacgcgtttgatgaatttttccttaataaaacatcatgtttttattctaaataaaagtatataaaaaaagttgatgtagcgctcatgtgattataaactaacgataaagattatgaattgcagcagataaagactaacgacagtctacagtatgatcgataacctaacaatcgttaggccttgttcggtttgaattggattgagggtgattagagcggattaaatcgaattgttagggtaagtagatccagacttaattgagccaacgtcgactagtcctctatagtttacacacggagacgtgacgcacgttgtttttcactaggtccagccttaattgcggcgacatccagtactagtactaatacactgtagttggcacacacggagacgtgtatcacgttgttttattatttcgaatcatcatgctcaacctcgacatcttattcttcatgaggccgcagttcgtctcccgctctataaatagctggcctgctcgctcatccatcactcactcactcactcattcactcacacagcaaatacccacagtccacagcaagaaccgaag

SEQ ID NO: 107 - DNA, 3000 bp, Zea mays
gagaaatattgatatctatgctattaaaaacttctctaaactcgcgatagaaaaataagaagaaagtggtacaattaacatataattattattgcctttattgtaaacatgctcatagatagtttagaaaagagtatatgtcatttatatctccctaaaaaccttgatgggtaaatttgaaaaatatggcataatattgtggtaatattatttcattaaaaactatatgagaaaactcatacaaaaaaatagtataatgtcttgctttagacaggctaacatctaggtgatttctctccctgaatcttgcacatatcgaagttgttgtataccaattccttaaacatatttcgggaacaagaaatctagtaaggacttagtgaacaaatcgtatgatttagtttgcgagatgtttatttaatccatttgtttgccgaaatacgcttggttatgttgctcttgatgtagcatatgtataactgaaggacggtgaggcgaccatagggaggtgaatgagagtcaatcaaattttgctgctaaaaattgaaattgagcacttcacttcattaaaatgaagaaagccctcaaaccaaaatcatatcagcaaaccagtgatttcataattttaaaatattcctaatactcagacgagaccagcaaattgaatggatcgtaaatcggacaccaaaaagttcgaattggtccaaaaccgtgtcaccggctagtgttgatttcagtagcacgaaattcatttctctgatgcgaaactgaaccaaacgaactccgattgacatgaaattttacacacaccttaacaaaagtgtttgcaaggtcttctcaaattttgagctcaatcagatttgtaaatcaatcacaaatttcaaaatactgtcagaattggggttttattggggttttctagaacgagtttaaactgagttcttctcaaatcacaaccaaaatctggaacaacatggtgtatgcagtgatccgagaagtttaactcaccatcaaacaatccccaaaccaaattctcacacaagaactcgatggttcttcacaagatcataaaaagagaagagggaagaacactgagattgagagtcaaccaaagccatgggcggaactgaccacccttccttggattaatctatgaagattacaagacagacacaaaggttcaaagcgttgtggatctctggttacaaaactggagtactgagtagaaaacaactagtcctaaaactctaagcaaatgagatggttgaaacaactagccatacccttctatttatatatggtttttactactttctaaacaacccctagatacatagagcctatccacttagccggagcgaaatgaaccaactcctgagatttttatctagcagccacgcgttccacacgaagttgttttgccttgacgcacccttcgcgatgatgccacgtgccaccttccgattctcgccggaaccaccaccaccgagttttgagaccaaacccggtcaaaaacctgtcgttcgtagcgttaggtggttttgaggctcaaccactgaaactaccgtgagtatcacagtgcgtgcgcgtccaccacgtcatggatacatgtcccgccagtcctcgatcgcaccggcaacacggtctgctccaccatgtcctcgcgcgagtgcatgtcctaagtgtcagccaccacagctggtcacctggcgacttcgatccctcagtcaagtcccaacgctcgtccttcatcgctctcggtccatcggcacgaacccgcatgaccttcgccgttgaccgtcgtccctgtgctccacacctgcacatcacaagccgactgacatggttgcagatacataatctcacattctggtcagtccactgactaccctagagtgttacccgttgacaatcactcatcatcaacctgaaccataagtgacaagacaatcttgtgtttgcaataacacaagtagaattatctttaaagataattgttgatgaattaatagcaccaataccacgtgactattgtatgtagtctatcattctacaaagtgaaacacattcacgcgaggcgtcatgtagcgcaattatctcagaatgagttgttaaggtttccaccttaagtctattttgaagacttccatgaaatggttgttccactgtgtaagagcaccaaacttccatagaatctaccattatgaggattagataaatagccaacatcaatctatccaatcatattagaatatggatttctttagaaaaataatccaagatctcttgtacaattaactaaggataaatttcgatgatttttggtaggagcagtgctatgtcgaactagcaagtttactgcaaatgcaatgtcaggcctaatgtaatttgcaagatacataatcactccaatggcactgagataatgataatgagctcttagattctcttccctatcatcatgtggtctacattgattagtctccgtttctaaagattaaaccgccatatgagttttggatggatgtggtttgtccctattgtgggaggtaagtgactaaagacttattttccaaatcagtttagataaaacggttaaaggtgggatcacgtctaacattttcccgtgtgagctggggttagtttacgtttttcccgtgtgagctggggttaggttatgttggtttggtgtggcggagatacattgtcacggtgaccgaactaaccaccctccccgtcccggacctcccgagtcccgaatccatgaacctgcgcccacgcatccccaccgcgccaccaaccccttgcactccaaacgcaggcgccccctatatatcggtcgccacctgcccttggcctcctcagcttctcgctctgaagcttcaaactaccccagttatccggcgcggttccttgcttgtgtcgagcagagatcacaaaaccaagaaacagctgaggcgccgcgcgcggaggtagctgcctgaactaatcggtgtcgca

SEQ ID NO: 108 - DNA, 3000 bp, Zea mays
ctgagagttcatcaactgacagctcaagtgatggtttaattgaaaccttgttacttcagagtcgaaagagaaaccgacagatgatgatgatggtctcctttattggtatgtactctgccaattacatgtgtaaagctccaaggaggacagccactattactggttttcaatgggttcaagaaacactagaaaatggcatagcctgtttcaacatgtttaggatgagtgccacattattttatcgtcttcatgattcattggtggattcctacggattgaagtcaacatgtaatttgtcatctgtagagactttagggattttcctatggatggtgggtgcaccacagtcagttaggcaagctgagaatcgtttcatgagatcaacagcgacaataagccgcacatttcataaagtcttgaattgtcttgttaagctagcaacagataatattaagccattggatcctgaatttcaaacagtacatcctagattggcccagcgtcggtttgctccatttttcaacaattgtattggagcaatagatggtacccatgtacctgttgtggtgccaacaagtaaggtgatacaacatacaggaagacatggatatagtacacagaatgttctggcaatttgtgacttcgacatgagatttacctttgttgtaacgggctggcctggttctgtgcatgatatgagagtgttcaactctgccatcaccaaatatggagacaagtttccacatccacctccaggtaaacctatctcggacaaaagtattaccaaatttgattacttgtactcctatttgacataaatgcattttttgtagggaagttttacctagttgactcgggttaccctaaccgtccgggttaccttgcaccatacaagggaacaaagtaccacctgccggagtttcaaagcggcccaatgccacaaggtataaaagaaacctttaattatgcacattcgtcacttagaaatgtcattgagagggcttttggagtattgaaaatgaagtggaggattctattggatttgccaagttatccaatgcataagcaaagcaaaatcattatagcatgcatggcaattcacaacttcattagggaaagtgccctagaagatagtgattttgatttttgtgatagacatgaaaatgttgtaccaatgcccaccatgctaaggacaggtacacagaatacaaatgcagtggatgaagacatcaatatgaacgcatttcgtgatgaaattgcaaatggtttattcaatagatcatagattatgtgtatgaactacgacaagtttattgtaaggcactgtttaagtatctttaattgtatggttgtatttgagaaaaaatattgtaagacctttatattgtaagacaattatatctgaaaaaaaactgagagcttgcactcggcagtggcactgtgtattgcgctgtgcattcaataatatgatgatataacattaggggtatgagtgtctttttatttcaatgtgctaaactttatcagagtgatccaaacaccttcaaggagctaaactttagtatttcaattgatatggctaaagtttagccagaagctaaagtttatcttgtgggattggaacaggcccttatatggacaaactcaagcatagctggattgaccgacaaaaaaaatggcctccattatgaaatatcaagaagaaattgttttggttggaattgatttttttttttgcgcttagaaacttcctttgatagttcagaccagttatgataaatcgatatttctcaaccatctaaggaaggctaaatatatatacagaaagaaggtaatctctcctgtcatttttcagaaatttttccctgcgttttgcttagcatgcaattattgcacataagccatacaattcttcaatcatatcttctactgtctatgcctctcgcgccaccgaaaagccaaacggctctttatctatccacgcccgtgttcccatatttcgtagactgggtccatacaccagcgtgacactactcttatgttagacgcttcacttgtgtgctctgttcatccgcttcaccgatcaatcgctggaagacagcttttttactctaaatttcagcggtctaaacgaagaggatgtgggtagcacaccgaaggcgcatattcgttacgaagacttctatgacaaattttaacatatgctactaatgtttatgctggtattatcatggattaacctataaatttttcatcatagagtaaactatgaaatgttggtgaccagtattcttgttaagatgtatttagcggatcttgtatatgatcgataacattttttatagtgtgactgttaaaatagagagattagatataagatgagatagccttacccctcattttaagagtgcacatccgacttctctaaaaatcaatcagtataaagtttatgatgttggataagtattattatattaattatataataccaatgtttttcatagtaaataaagatacatataatgatattattttctattaaatatagtttaagttaaaattgaatgaattttcaaaaagtaattttaggaggagtatacagtatacattgtatcataatagcaaaaatttcttgtgacacgaaggggctcctacgaagtgacaaaggctggccactggtggaaagtgcttccacccagagtatacacatgaatgtgtgtttagcagttggaagtctaaatctcttaatctacttctagtgtgtgtaaaggacgcacacgagtgtgtgcgcgcttattgtgagttcgtgtcatgcttaaaaattccttgtgtcggtgtatgtagacctgacctagcgaacctcagaacatgtgtgtccagtgtccacttgagaagagaacataataaccaccccctctgctgtcatctccccacggttggtccacctcctcctgctcctctggcctctgcggtgcctcctcccggtcccgagtcccggcc

SEQ ID NO: 109 - DNA, 3000 bp, Zea mays
ctagcttatttgattcaccaagatataactgcagatttgtccagaacttgaatcacatcaatagatcagcacgtttcatgccaatgatgtcttgagtgccttctcatgtaaattatccaaagcacataacactgattgacattttttcctattgttacagagcacggttaattcgtccccttgttagaacctagaagaatgagtcatatatctgcagacatctacactgttgctgactgtttctggtcatcagttagtttccccccaccttcctaaaatctatgtcgagtcatcgagtaggagtttcattcagtgggaaattgttgataaatgcttttgaagttcatgaacctgcatgctgcaccttgtatgctaacaaatcgtgagttgcattacaatgaacagtctgttgaattcatcacagaccttaccttaggctgatgcccttggtggaatagtttgtctgaaaaaaagtacctatatcgttcaatacaatcttccatctactactttgtcctgaacctttcgccatcttcttggcaggtaagcagaagcctggctagctggcctctggtatgtggttggctcaaggattacaggatttcaatcagtaacaatcaagtatgaggaaggtaacctggctgatgtgttgttttatgtttcctagcagcttccagcttatatataaatatatagaagctagtactgatgatcaaaaaaagaagctagtacaacatagtcacaaagtagaattgccgacctagctagcgctattttagccacagcacaccacttccaggtctagttgacatgacacgaacaaaatcctaaaagtccattagtctatccaggagcgggttgtaaccgcttcgctgtttctatacattgaacattgatacaatcactggcgaagtttgagcaaatttgagaggatgcatttgtcttgtaggtgcataagaattttgtatagtggtgtatatggtaaaattttactaaatctatagattttgcatttttggggtgcatttgcaccccctaccatcaacgtaacttcgcctctggatacaataacggtggttctagactcttgatacagctatacaaggagtctcactgcttaattattagttcctcattgagcataagtatacataacaccaagctgggtccctgcacatttgtaactaggcggtactagctgcggctctgttaattactttcctctggtgctgtgagtcatcatcatcatctcgttcatgcgtcaatggaacgtagctgacagtgaaaactaagaacagttgcctacagttgtctcccatatctgatcgttccgcccaatcctatgttgattctggacatattgacttgacgcaggaacaacaacgggtgtccaagcttgggtggttggcttgccggttacagcaagtcaattagtaactacagatgggaggaaggcgaccgacggtatggctgacatgagaccctgtctaactcatgtttcttccttccttccctcatcagccgtcccgtcgatcgggcaaataaagttgcgcctagggaggaaggaaccaggcggcaggctgcccgtgccgacgtggatcgggccagagctaggtaagtgcacctgtgggctgtggtcggcaggcgatcgaaggtgagtgagccggtgagccccgccatgcactgacggagtcactgccgactctcgtcgtccgatctctttttactgtggacgaatgggtgcgtgcagcctatctgcctatgggaagcgagagggggcccgggactgggttgagcaccttgtgcgcaaaggcatggtggcgtctggggccggctgcaggcgtgtgcgcacctgcacgagcgtgcagtcgcggcgcgtggctgcagtttggtgtgcctgggacggggactcgtgccgtgtgtcctgcgcgaggtggttttgcggctggctgacggaatggttgatggaatccttgcgtaaggacgcaactgagaggtaagcccccctcgtccccgtcccccgtgggaaacgggagtgccaaagccttgtggcacaccaaactgtagcttttgatcgtgcatggtggggcgcctacctgatgctacgcaaacttttgtgtcgcagcttcagttaccctgaagagcagggcaagctagcaaaaggtgaaagcgtttggtcacgtagaatccatacaggtcatacatatatagcagtcgcaactcgcaactcgcacgtagagcgtagaggttcaaatctgagccttagttcagaatgcagcttcagtttgggagttcgttcgtgcatagcaggccctatagctggggttagtcgtgtgcaaggattctccatgtggacaacacaacacaagcaagcaagctaatataaggttggatttaaaagtcgcagaacaattcatgacgtgcttggaaaacgttggtagcgtcttttaatgcttgatctaaaggctaagttatcatccatgggctaggtttgtttgttagtattaccctgtccagtgcaagggcaggtaggaggtagagagagaccgagcaagtactaacctttcatggccccggtctgccccccagctccctctttcccttgggggccgctgtgtgctccgtcgccatcgcgggggataaaaggaaaaggctccgaggaaacagtataaaagcgcccccggcacgcacgcacgcacgcaggctcactccacgcagcagttgccaggcgcttgtcactccagccagcggcagcccttttccttggcgaggcttggtttagtttagcccgcctgcggtctgccgcctgccaagtgccacctgagacctgatagccgcaaccgtgagaggctggtagcccgtagccggcatccctcgccctcgacccatttgaacagggcctcgagctttgcctctgctgctgctcgcttgatccgtctcttgccgtagtatactacgcgtgctcgatcggcggcggcggctctacgacccgcggccggg

SEQ ID NO: 110 - DNA, 3000 bp, Zea mays
cctgtcgccaggtcgcggaccgtccggcccagagctgcggaccgtccggtgtgacgcagggaagacactgctcctgcgcccaggtcgcggatcgtccggcccaaggccgcggaccgtccgcgccgtcgcagagggcactaccaggcgatctggcgacctgtcgcaggccgccactactgttcactttgcggagccgaacccaaggtgccaagcaccgctaagcggttcattatagtgtttggtgaccaaaaaggcaccaacataactattagctttaatgtatttacacctcccaaattcatgtccgtactattggtatttggaaagttcggaaccgaaacacaaggtcactcgagttatctatactactttattaaaatctgacgtcaacgtccatcccgccctcgcacccgcaccggatctgggagcaatgcatcttaagacattttggacctacttaacatctaaaacaaaaagatctatgctaaattatattgccggaaaaaattcctcctatgttctatgtgatattaaactacctccttgtatggttcctagttcctacagaattcgtgctttttgaacggataatctcaaccttggtcagagcctccctggtagttgcttgattcaaaacctataacccattttaaaaatggaataccgtaggatctggactccactcacgaagtgctcgaccatggattaaggaaatagtggaaaaagtaggctatatggatgtctttgccccgctttccatcaaacagacgtgtaagtcggtactctcacaattttaaataatgagttattcaatttttaaaagtaaagcatttaaagtttgatcaaagcaataaaaatatgatatcaaataaatatactataaaatataactattgaagaatataaagatagttagtcataagtgttatttttattgtataattttgatcaaatttaagatgttttgattttgaaaaaggggtagagtatctcataatttgaggtggagggattaatgtggaggttttattggtatttggatcttcagactaaagcttagtccgaatcacatcgtttgatgctaatttgtaggactaaagatgagttagttataaataatttgcataatccataactatttcatatatacaatcatcaaacctaattaattatttgagaattatgcactttaatgattaagttaattcctaaaataactagtaaatgaatcagagatagacgatatatggtgaaaagcatcgtgtctatatagcagattaaatccacatcaaacactagaggaaaacttatcgtttcttaccgtgaagatcacttcagcatagatagtgataagatcaagtcgaaggcttgatgaaaaccgcagaacgttgcagtgcatatcaactcgatgagtagtcacgtgataactttcaaaaacctgatttatcctaacccgtgcaagttctttagtagagctttcagagacactgctttctctgtacaccgtaatcatgccggtgtcaaggatggaaggagcatgatggcacttagcactgaggaaccgatagctctatcgccaaaacttagtagattatttttttctctcttatgttttggaggaggatgtacctaggggcgacaccacgttcatgttccctgttgcacgggcaacaaggtaaaaacgagagatgctactagttggattcaaattcaccaaataaatttattgaattatttatttccttaagttgggcaccagggtacatttcgagctggtttcgcccctggatgtgcccctaattatttacaggtaagtgagcttaagataacctgccgctggaaggaagtaaattgacccggcaacgatcttcatgaatcatgatctaattgattcggttctgaatttaaggcgcaagatacggtcaaaaagttaactgaaagctggcaaaataaatatagacaggaaaatcactagtcaacacacgacaagtcatgtggatattcatgcaaaaatgcataaactacgtgcgcacgtccgtgcgactatctgctaaattatccaccattccaaacggtatttacaaaaggtggtaagaagcaagttatttaagttggttctcctctatctctactatctgctaattttttccaccataccactatgaagagtgtgcctttgagattattctgaatttgttgtgacataaatgaggcttggtctataaattccaaactaatatacccatccgttttaaatatatgacgtcattgactttttaaaaaactttaaccaatcgtattattcgaaaatctaaaatttcaagtcacgctcaaactatcttaattgataaaacaaattataacaaaatagataatatttcacaatttttgttaaataagacgagtagtcaaagttttaaaaaagtcaatgtcgtcatatatttaagaacagagttactatcattaacagatttactatcgcgtcatataggtaaatattagttaattaaaactattgtgtccatctcgccaattatcatagcttgtagccttgtatcattagtttctttttggtatccaaacgtccaaatgatccgactaaatttttaggactagatccaaacctctctggccgcgtcaccatgcatgctggccgagtgcagcgaccagcaggtccaccgcccacgtgctgagacagtgacagcaccggaccatgaagccactcatcgcggtcttccagtgcaggccgggtcgggcagacgggcacaaccccaacccatgaaaccattcactgcatgcgcctccacctaccaaaccgcggtctcggctcgctcgctcgcttgctgggcttgcagtcgcagcctcgcaggacgagataaatagtccacccgcgccgagcgccaccgtctcatcatcagtcatcacataccaccaagaccacatcggcacatcgacgtgagctcgtgcgtgagtgccctggtcgacgaccgctcgcgcgcc

SEQ ID NO: 111 - DNA, 3000 bp, Zea mays
cagctgactattaactttagtacattcaaacaggatcttaatcatgtgctaatagattacacgttgactgaaagacttgggaaacgtagaaacacagggaaggccccccttctaaaaaaagcaatgaaaaaaaattaaatactctataaatattttaattgtatagcaatgaaacaattcatatttttatcacatttataaggtaccatccatattgtcgggccccttaaccttctagttccatcactgatcgttcctgatcgtcaccacgtgcatgaatgccttctagttccatcactgatcgttcctgatcgtcaccacgtgcatgaatgctcacagtcatatgcactatgttccacaaccatccacctccggccctccctctccagagtccacacacaagcttagggtccaaattgaggttcatgatagagaaaaaaaatcactggaaccctaaacatgtgttcattcagagacaaaattggatatgatggctttatatatcccaaaaatttagaatgtgatcatcacatctcctatttggttgaggagatagagccctcctcattatttggtaaagggctttggatgatgtgaaaggtcaggccgttagtcaacgtgagtgttggactccacatatcatttatgagtcccacatgtcaatcacacatgcataacttcatcatcctcatttagatccacagacgaataatgctcatcttgcctgtttcggctgccaccaaagccgcctcgacctatgtgagctatgttgtcctgctagagccacacctgtcgcaccacctcgctagagccgcctcggcatggacgctccatcctacaaaagtcatacaatgtcactccatgcccatgcctcacctcacaatggaagagagtggcaatgtgacgcaatcaaagatggatgcctccaccactctagttttttaggcctagaattcatctcctattgttctagggatggatccatcccttctgccataaatcaaacactagctaaaataggattatcacatgattcacatctcacttgatatctctaatcaaacacttgctgactcactgcctttaatctttgtggtgtgccccactgtcaccaccgttgatgttaggtgtgaccgcattgtttcttttttctattgtttcttcttttgccaaaactgtttatccatgtcattatacggcggtaacgtgtggtaacgcttgttaggtgtggttgcttctttttttgttgttgttgttttcttctctgccaaaactgtttctccgttactgcaatgctttattttatttgaaagggaaacaaaagttgtagcgtgaataaaattttattaaaatatcaaaaagaaacaagtgttagctagtttctattgcttttattttgttttatttacaaaagcaaggggtctctccactcctaacccttgtggtgattccttcaaccgacgatgttttccttttgttatttttaattaccttttagcaaaatctgctctattttcttttcactaagatcttaccagtgcacgaatggatattatataggacatttatggatgcaacctatgtttctttctagctctaggcctttgtcccaagttgaaatcgcttagtgttttggctacactgtttatggatctagtgacactgtttttttacgaggatctatctacctcacaactgggtgttttgaacggttcaacatttaaatttttcataggatggagattgaatagtcgttatcattttcttataccttagggttcttgttgcctctcatcttttctacctctcgtcactcatggcatttccatgaaacacctccgtcttgcccacctgcctcgtctcctatggttccccaccaccaccgtgctaactcaacttcgctagggcatcactgtgactccccatttccctgtccaactgtcttcctccattgcccccatcaaggacatcgccgcctcctcacccctattgcgcccacaccatgctgcaccatcgtcggtatgaacttctttcctagatttttcttctagacccttcagaattggagaaggaaggtcacttgacctcaaaccctaaccaagctaatcacatggcaagggcttgaatcgagacacccataaaatcgagtgttgcattgccccagaaaaatgtgtcatttagtatttctcttttacaactcttatataacacaacaacatcaaacaataaataaaatttgtagggattacattgttgattgcttaacctcccgatccgttagatcatgatccaaccatagttacaatcatggtttgttgaggggtttataaaactacacgagcaaagggtttaattgttaaaatataatatatgattggatcataatctaacggaacatgagactcgtttgcactaagagatgctccgagtcggagaggtgatccattgcccgttagacaacaggtgtgggccaggcgggcagattggactatgtacgccaaatgccagtttaagtccgctaagtattttatttttttagttaattactacttccgttcttgaatatttgtcatcggctaatttatttttgaactaaaacctgacaaataaaaaaggagtacacaagatgataaaagatgaaagaagaacaggtgatctgaaaaaacaaactggtccctgatgattaggacgtggtgcggtgaaacctgaaaggatactactgatgctgcactgcacacagcacagctgcacccgaaacgcacgcacgcacgcacgcgacaggcgacagcgccagcagaggcccgggcttacataaagggcagccactccggcgattcttcccccgaccgcttcttcgcaaacctccccctctcccatcgacttcctccgtcgtccgtcgcactgccacggatcaccctcttccttcgtcttcctccacaaaacctacagcgctggtgcgccgaggagctagctagctagcccggccggccggccggcgcc

SEQ ID NO: 112 - DNA, 3000 bp, Zea mays
cacacactttacaggattgcttatgttaggacctaggagtcatagaagattgagtggcggccccaaactgggaaagtgagaatggttagccgttagcccaccactccgtggtcgatggacgcatcagaagacaaatggccagaacctctttgcaattctagtaacctggaaaagggttgccagccaacagtttttggtgtgccaactttcctagtgaacaggatttcactgaggtcctgtcacacaataataactttgacagcaatacgtgaggcagagattggcagaagaaagtgcccgtgctagtatctttgtagtggcacaagtgctttccgccatgagaatttaatatgtaaaaagaaaagccaaaatgattcaggaaaggagattctttcccagattgttgccactatcacaaactgtgatttgaaagataatgattacaaaagtggggggggggcaagcatttttcgggctgcctagctatcccaacatgggacttctgccatcccccagcaaataatggaagatccctcaaatgatatcagactcggtggcaagcatgtaaacctgaaatgtttctttcatgtccagacacccaccacaagcaaattctactgtgtgcaaaccacaggtgtggggcactgaaaactagctcacgttagactttgatgtgggcagaactctaacaagatgacctgataggtacccagaatatcctatcagttgggtatttcaccactgtattattgtgagtttgacaacaagaaagggacactttgccacagaactttcatttttttccattgttcataatcatgcactcacgaaaataccacaggaaagtgtcctagataatgagaaacagctctattttagcagcgcacctacagttaagctgtgccaacatttggtgctgtaaaccatggacaattctcaatgaacatggttactttcctataaataatgcacaagtagcatcagtgtatctagaattagagtggccagtgtgacttaaactgtaatatttttagggtaactatgatgacatttcatattaacatccataggaaaaggacaataacttatttcactggtcgctgagttcagtcctcagtttggtatttatttggttaaggggaataaatacatgtcatgaaaacatagaatggtcaactcaattaatatagaaggttaactacacattgagacgacaaataaatgggattttcaacctgaaaatacaaagtgtatccttgtaattgtgatattaatgttacttaccagataactagacatctatttcaattataaatatggatagatatcaaagaaaaatcttgaaaaaaaatgcacttaccttcaattcaccttatcacatcagtttgcttcagaaatgataattatctgcactcagctacaattatgttggccttgaacaacttgtatgagctatgagtcaaaggactgagagtggccttagtgacgatagactgacaacagaaacaacagggcgagttagctccaagagtaaaataatgtatctgcaaatgactcaaacatccgatgtgaataaacattgtcttgtatttttcgagaacaatattttctacagtaatcttgctacctcacttcagaacaaattatctggttcaaatgaaagagagttattgcatgtcactactgtagaccgagaaccgaagcactttagaaatactgcagtacaatatgagcaccaaagtatactgagaaatcaccggcaacagttttgatctgataggcctattcccatcagtggtgaactttgtttgccactgagagagcttcaatcagttacaaaagcaaacttgttgggtgtaacaaaatatgacattacacgaaagcgtgagatttgagtctgagaggacaaaacattgatacaaatgtagcagtgtaatggccgcaataatatcaccaactatatgtatatacacaagaattttcaacatgttcacaaagaaaagtaaggaaatctcagatctacccgtatccaccgtctcatcactaaagatggacatctaaccatcctatagaaacaaagatttttccttccaatgatagattattttccaagttttctaaacaacttatggaaggtaaattttttaagagaagaccaggataacctttttaaacagtagactattaagctagagcattcaaaagaagatagctgtagaattcaaaaggaagttttactcccacatcatcacaagaagctagaaagatattactgtaaaaaaacaaccgaagctagaagggtgccatcaagcagaatgtgatcggatagactgtacatacatgttgattttcatagttaatcttcgacaaattctgaaatgaaaagggagggtcataaaaacaacagttgatacaatgaatttatgcttagcactctaccaaagcaaactttgattatgattttgtcgatataattgacagataagaagagtgtaaacatgttgacattgtgtaaatcaacaaacatggactagaatgcttccttatgtgaaatataagttgtctccactctgacacccaccatgtcccaaaaaataggtgggtgagcgtggtgtccaaatgtctggaggacagaagcagaggattgctattgccagagctatccttaagtcacccaagattctcctgcttgatgaagccacaagtgcattggacacagagtcagagcgtgttgtgcaagaggcacttgacctggcttctgttggcaggacaaccattgtcattgcacatcggctctccacaatccggaatgctgacatgattgctgtgatgcaatacggtgaggtcaaggagctgggatcccacgatgacctcattgacaatgagaatgggctctacacatctcttgtccgccttcagcagaccagagattcaagggaggccaatcaggttggtggaactgtaagtacatctgctgtggggcaatctagcagccacagc

SEQ ID NO: 113 - DNA, 3000 bp, Zea mays
cacaacaaaaatttaggcacactagtagacttaggacatgcatgttaactgatggctcttagattgttagcaaggattacaaactcactcactcgtagactcttatgaacacaataaattgttattgctaacaactttctcaacaacactaaaagatggaagaccaaaacgattttgccacgtgtttattgatgaccttctagcactgcaaacttcctttgttgttgagattgtaagcatatatgtcccttctatgcatctttctctaagcataattgttttggttttctaatccttaatgagaaacaaggtagcatgtaattcaataaagattgaattattatatataagttgatgaatagagacaagattttttggattcgggaggagcgtatatatcatcttttagtatcaaactacaactaggagtagttaataaagtatggccaatataatggatattcatacctaatccattagtgctatggattttatcttattattgatactttccgatagtgagcttttttagttctacagtgatgtgatggatggcggcggaatgtaacatcttgaatcagactaataagaatatgtagaagagataacatttttttgtcttgaacaaaattttcatcaaacatataataacacttagcaactttgtattttcccctaaaacaaacttggtagatgagttactcatgttatataccatggttttgattaagatctgctaggatcatacctatgttgttatcgatcccaaagccgccactacttccactacatcatgtacaatatcttatagcaacttcaaaaggaaatggaaaattttccccaaaaactgattatgggggcatactaaatcttttaagtggtgtaataaactattactccaatagccccccacccccacctaaatagaaagctaaaacgaaactagaccaacttataaaaatatcaggttctgtcgctggcctatcgatgcatcttgattccgttttttttattttttcttcttgatgtaccaataaacacgggcatgacacctcgtttcgaggaagcgcgcaggacaagtgaactcaccaggaggcacgcgggcaggcattggggcagtggcggacgacaaaagaaaattaaggtatggctagctagtatgggaaaaaggaaaaagatattgtgcacatggaaattaaacaagcaacttgatgtctcagaattaaccactgcaacacatacatcctaatgtttatattataaaggaaggcatgaagattttaaaaaattggggagtctttacatgttttctcggagatgcttttagctgcgcagacctacgcactcagctcaaccgtgcgcggtgcgccctggttctcggaggcacctgccagtgccaagccaaggtggcggttcaaaagctggatatatttctaggtgcgaaaactactggcaaggaccaaagagaccgtttgcaccagattggatcataaagaacattccagcacgaaaccaaatggcctcttgagaatacctgcctgccatcggctgttttctaggataaggcttccgacttccgagtgggcggttccctgcaccaggaccatcctatctcttctatgcaccggccattccattccacgccaacggcgtgagcgagcgccacctccggacgacatctcccgcgacccggcaccgccgccgccgccgctaaggacagaccagcaggaccacgcattttgaccgtacgaacggaacgacggtcctgcatttcccccagcaagaaaccttcggcgagagggtagcggaaagtgtgtccgcaacgcctcgccgcccgcgcgcgacggttggtcactcatcactcatcagtgagaggcgacagacggcgatcgtgaatggccgcttccgcgctccggccgatcgaaacggacgacgacgcggcgggacggaccgggaccggcttctccggggggcaggggcaccgccccggatggaagcggaaagcttgcaaccgaagccgtggcgtgacgtgcacccttgccggggccggaacaaccggttcgggatccgggtgcaccgcgatcacatggcccggccggcccccgaaaaaccgaaggctgactgcatccccaggcgttacaaaaggtaggtagtcgtggagagatgatggatcatgtgtaggctgaagttgcacgtgaattgttgcacgcatattatccccaagaagaagagaagaaaccccgggtaggactttttggtagcaacgctaccgtacgtacgtacgtacacggggcctgtttttcttaagctatactgtaatgaactagacagactgttcttctccgcacatgcttaatatctggctgctgctatgccagggaaataagcaagaagaggaagccatggataaatgtcctagcttgtcctactaaacttttagcacgcacgtaatgggttccagaagtttctaaatttgaacagatgttgaagtgtgacctgcagataacgtgttgtctcaccctatctctatagccagaaaagctgtttttttccccttccacttctgctgtaagaggacatacacatactccacgtcacctcaaattggttttgcatcgagcttcgtcgtcgtaggcaacacaaagctagccctcgaagagtattcggagcatattcctcgttttgaacggttttaaagcgagaaattaaatcaccggagccggaaagatgcgtaggaaaaccacgtcggagaagacgctattttttcaactcctaaaccccggatacttactggctgctttatccgctcctacgaaaggcaaaggctactgggttctgcctgcttctatataagaggcagcctggcactggcaggcccatccctcgtggcctctctcccctcctcacacaggcacacacgcactttctgtcagcttcctcccctgcgccgataagcaagcccgtgagccaacagtggtgccagcggcccgagcggcgagg

SEQ ID NO: 114 - DNA, 3000 bp, Zea mays; identical to SEQ ID NO: 82

SEQ ID NO: 115 - DNA, 3000 bp, Zea mays
accaatctcctcctcttcttcttttaatttgtttttttagaaaaaaggtgaaagaaagaagaagtggtctagacgtctagtacatgcgcttggaaaacgagtagcagggaattattaaagccgcattggagaatcttgtgagccgctgcagacgagattgactagacactgattgctcccggtggacaagacgaccttgcttgcttgctgctccaaagcggaagccccaaagcggaagctgatcctgatcggcatctgtcgtttccgtctctcttccgcgggtcgaatactctaaatatttctatccattcgctgttctcatctcatgcagcgagtcagtgttatcttcctctccgatccccgtgtgttcatcagtttttatcgtatctcatatgctccctccgtttcgtttagttgtcgctggacagtacaaaattgaactatctagcgacaactaaaaagtaactggggagtagttgacatcttcttcagatccaaatccaagatgcgatggaattgaacactcactggccgccccaccaccaccgcccacgtacggagggaacacagagtgccctccacttataaacgaagctatgaacatcgctatacgtgtatattccgaattaatcctctcggtctgcaaccttttcccttatgctcgaattgaatcttggcaagaatgacaactctgtgtctccaccaatggcatgcgaacgttctatacgtgtatatactccgttaccccgactggctggcactactctattctgtctctttaaccctgctagatgagatgtgccttttcaattagtttaccgctatactcaaccttcggtgttcttagctatacaagtgaggtataactggaaagtacatttagaaaagattgactgcacgtttggatatctgtgatgcgtatatatgtttttaatgaagtctaatgtcgtactccctccgtccacatggtttgtctctttttttagttttgtaccctaattacattcctatactatcatgacaattctagaaatataaatactcaaaataaattgctcaaaaaataatagtgagaaataaagcaagggtttagaagtctcctcacgttttttaaggacttaaagagttgacgctctccactaatcctcgtatgggtatagcttccccttgatccacacaaggaccaaacactctctatgtgctagtttttttatcgctttagtatggtaaaccgctcactaccgtgtacatgtcctgagtcacaacctcttcagatgatcattacactctgattgccaccaaattgcctggataacgccgatcaccaagagtaataaacacaaactttcacttggctctctcaagactcatgagaataatgaatgcatgttagttacccttatttatactaatgaggatgttaatcttatgcaatgcccccttatcgcacattatatgagctgctttggctattaaaaggggcaaggacacttatgctgggcggttgatggggcaaggacactaagagtgtaagaaagttgaatatatagcagtcacctttagtcttggttgatgatcccaaaccactaaccaagactaaactcttcctaaacctacgtgcggagctagccattgcgctaatgcttaggctattattcccaatgggtagtatcatactaattaatgagatgccacatgactttttctaatgtggcaaggtatttaataggagggagaacaaaagttgtatcttaagtaagatactgttttggcacgatattttagcctttttaggttatagcataaaaattgatgtttaagctcatgctcatagacacaacatcacaccaattaaatagttaaaatatatactccctccgtttatttttatttgtcacattttagttcaaaaataaactagcggacgacaaatattcgatgacagagataatactaagtatgacactgtatattgtagagggtcatttttatagcagtaccatacttttcatcctatatgatattttttaatattggagtattgatactttggactgtgaatagccttatattaattttgagatcaacgttaattaggctgtctccaacaacttatccctccttgtctctatatttaaactccactttataaaaatacagtttatagtataaaacaatggtttaagtaattacatgagtaaactgttcgacatggactaaagcccaaaaccaaaggtcagctgcgctggtgctaggatgtcatgttcggtgggatatatattttgaactttggcacgcacccctatgcagcatgtcagaaacttaatatacgtgtacgagtgcggcatctcagattgccaagcgtgaaattcttctcattctccgtgccacaggtagagagtgtgtgtgcagctagcaatgctgatgattagctgatcacatgctctataggtcaaaggatcaattatgtgtgtgaatctttaattattctatgcatatgcttttgcacatgtaaacaccaaggaatatattagtgctgcatgggtccggtccctccttgttggcgtatttaatttgtggtcatgtgcaatggcgatgtcaaattaaagcgagagtaaaaaagtggtggtgtggatggtttgtttctctgccatcacaagctacgatgggggttgtggtatcaaatccatgggatggatgaaaactgctgccaattttttagatgtgtgcctcgctatggctgtacgtgtagctaaaattattggacaccaaccctaccctttgtgtcgcgcgcgcttctccctttctcaaagttgcgtaccgcttttcctcttcatctgaagctgctgccatataccgccctcttcctctcctttatatctaccccttggacctggaggagaggagctagtgagctaccgagaagaagaaggaagggccatcttccgacccacttgtaggcgctgtaagcctgtaagcagtcacctctcagccacagac

SEQ ID NO: 116 - DNA, 3000 bp, Zea mays
aaaatccatttgaagaccggggggctacacccattggggtgcacctccggtgcaccccatggattatcataccaagccgagatagtgccgacttctaatgcgtggggacaagattaaaagaccaaccctcaaccaagatgcaggagcacaaatggagataatttcgggggaagaccttcgagtagattattttctaaaatctactcaaagctcgggggctacacccattgggtgcacctccggtgcacccaatgaagttcagaatcctacaaattgaaatgccgacctctaaggcacaagcatgaaactaagcttcggtcaaatgagtgatcggagcaagagaagacagcaggaagtcatttttcttcaaaacacccgcaagttggacctgggatctttgggctgattacctctaaattaacccaaagatcgggggcttgtgggggatagatatcccccgggtccactaaaggagtaaaagacctcacgaaaggcccaagggcccaataaatcgtaaggtcattctttcgtgggcctggggagaaacaaccaacaaagcagagcgacgtgagaccggattggtgcaaacccggacggcccacaacgtcgagcgagtaaatcgcaacagagacccgactttcccgcgctgaagcccccatgcaacggagccatgcgaggataagtcggcgagggttacgtagggatagactcaagaggttcactatcttttagctacttgttgctatcttatccacgtgtactgccccacggtcgagtatataaggcctagggggcaccccttcagatcgatcgaccttttacttagccatccccgtcaactctctgtattcttaatccggagagctctcttataaccgcatccaccaagcatactcaccaggacgtagggtgttacgcatctctaagcggcccgaacctgtaaaccttgtccactgtccctcgtgcgatcggcacgaaccattttgctacagttgtcgacaccatcctactcctaaaacaccttgaggggcaatcccgggtgtgcggtcggacccaaaacaccgacagaccccgatggtcgtgagatcccttgaaatggataccgacccatttagaccaaagagtgatgatgagaaatcattgggacctgaagttccttaccttagcgctattggagcactgatgtaccttgcgaattgcaccaggcctgatattgcattcgcggtaaatctactagctagatacagtgcaaacccaaccagaagacattgggtaggtgttaagactatacttagatacctcaaaggcactcaagatcttggcctgtttttcccaaagaatcaggaccagactatggtgggctatgctgatgctggatatcagccagatccccataatggtatatctcatattggctttgtatttctatgtggtggcactgctgtatcctggagatcgtgcaaacagacattagtaacgacgtctaaccactcataaataatctcactatatgaagccgcacgagaatgtgcttggctacgacggatgactaactacatccagaagtcatgtggttataacaccgtaaatacccccaccattatctatgaagataatgctgcatgtgttgcacaaatggaaacgggctatattaagagcaatatgactaagcatatctgtcctaagtatttttatcctcatgaactccagaacgagggtgaggtaaaaatcctgcaagtcaagtcttgtgataatctggctgatttattcactaaatccttacctgcagtcacattcagaaaatgtgtacgaggtatagggatgaggcatttgagagacctgcagggttcagggggagatcacctctgaatttcagcccttacaattcgacctgaagatcgtatattatacaccttgaaggttatagttgtcctgaagacacatgttgtactcttttttccattgtgagttttcctgaagtttctcacagatggtttttaacgaggcaacaagtgcaatacaacgagtgacactatgctctctttctccatttttttcccactgggtttttcggagttttgatgagacataagttgtcacggtattcgcccaagggggagtgttgagaaaccctaaaagaggtttaatgggctaataccgaaactgcccttagaggatacacaggttatatatatgtactcatacccctcataataaagagagacagaaagagtttccatccactgtgtctcttattcctctttgtgttgggttgctgggaagggagcgggcttctacaacttcccacgtccctactgctgttgggagggttcggagtctagatcggggatctgcgacaactacgttgttcaacaaaccttactcaacgcagagacgatctagggtacgcagcgctggtggggagtgagattccggcgatccgccggccgagcagcggggcccagcgccggttaaaaatcagtccaattataccttttctcagcccaaagtaaagaattgtaaagcgctacgcccagctacatgcagccaaaaaacctacggccggcccaattaagagggtgtttggtttctatggactaatgtttagtcccttcatttttatccattttagtctataaattgccaaatatagaaattaaaatagaatttagtttctatatttgacaattttaaaactaaaatggaataaaatatagagactaaaaattaatctctaggaaccaaacaccccctaaactaattatttatctcgcaggctgctcagcctcctgcctcctgccgacccactacaaatggttaataatacgccacgtcaggcgggaatattcaagcattaaaaagtcgggccagcaagaaagaaaaaaaaaccacaacaagagagagagagagagacagagagagagagactgccaacgaggcgaagcagccggccaatctagcatcagcgcgcggggtctgagagcagagcggcagggcgcc

SEQ ID NO: 117 - DNA, 3000 bp, Zea mays
ggatgaaggctgacaacattttccccaacagtgttgtgtcaactttgattgccgctaccgatccgtttgtcaagaagaaatcgatatctgacttgctcgattaggttatggagtagtgtgagatccatcatgtttccgtgcaacgcatgtgctgccttttttttttttgcattctgctaaagaatacggcgggataataatgtgtcctagtcttgtaatgaactacaagtgtctttgcatttggactggttcgcttgtgagtcatagagattgctgaactcgtgagtcatggaaattggcaactgtgtgctatttgttcttattttgttgttactcatttcatcaatcaagtagaatcaagatgagccttttgcacatcattccgaatccgatttggcagctgtggaagtttgacggttccttccgaaacatgcagctggtgaaatagcgcgtgcagcgataatttggttgttcaattgccgcactgtgaaactcagaaggacagaatttgataatgcaattgtggatagtttgttgttggaatcgcgtggcaatggtaggaaagaaaaaacattttacgtctgataataataggttctcatgatacaaattgctggtagccagcaatgcagatgcaggcaattcggcggccaatgcgactggtctctctactctcctgcagcaaaactcagctcaactcgtaaagaaatcctgaaccgtgtagtccttgacgtctgaacccagcgccacagggcgggggtccctcagcctgaagacgctctcgatgacggacacctcggtcgccgtggtgtccgcgccgcagaaggccgtccagtcattgacggccatgccggcggagaccacctcgctgcccctgttgacggtgccggcgaccatgggcacctgcagcagcgtggacagctcgtccaggtcctctaccgacgtccgcgggtgaacctggtttcggaaaagaaaaccgtccattacccgaactcatctctgctcgcgccgcgcgtgacaagaccgatggcccacttacgagtcctcccttgttcgtgaaggcgcagtagcttccaaccaggatgttccccgcgatcgtctgcctgaacacctccgcgccgagcacgtcggagatgacgtcttcggtttccttgtccaggtcagggtgtgtgagagcgacatggtcgttgcaggcaatgcagtttcccagggctgaaaggcgctcgtcgacgcacttgaccaccacctcatcgggcaggctgttcctcaggtgctggatctctggtaacacgatcaagacggggggaaaaaacgacggtaagcatgtcaggtcaggtcagaccattagtctctgttagtctgttaatgatcgcggtaccttggtcggtggcggtatggggaagaagcagccctctcttgttacctgacagacacacaaggcaagacaccacccaacatgttaggcaagcctcagaggagccggcagcggcgcagcgccagaccaaactaatccgcgaggaccaaagcgcagtccgcagtcctcaccgacgcagagcctcccgacgaccctggtgccggcgacggaggtcctgaccaccgggacggcgccggcgagctcgcactcgaccgcactgcattgcatgcacgccgcggtcagagcacgtgagttcggtgtcagtaggctgtaggccaggccgcaaccagtcgcggcggtcgcagactcgcagcacggatgctaagagctagaggtttttttttatgtatggttcgcgaaggagcctgccggcgaccgacctgtagaagccctcggaggcgccggcggggacgaggcagtaggcgttggtgagcctcgcgaagacgcccacctcgctagagttctcgaacttgacgcctgcattatatcatttgttggaccattattgttggcgttttgctatggctatcaatcaatccgcgcgctgtttgtaaccaaaccctttttattttaacctgtgaagtaacaaaagtgtcgtgccatggtactgtgaaatactaatacattattttcttttttatatatatttgatacccataaacaaatttaatatatttgatacctatatatatttgatacccataaacaaatttaatatcaaagtaaataaatggtacatgtatcagatattaaattgataagaataaatattacacttagtcaaagaaaagtagtttgacctctttttatagcttgttcggtcatccgtcctccttcagctagagaagtgatactatgtgggagtctctttcagctagtgaaatgataccatgttggagtattgctgcgcgtggctttctgtcatgttgggtttggatgatttcttataggtcatatgtgatgtgacggtctatagacaccacttgaattcataccgacttctactgcttgtagagtgtgacagtgtctctatgtattgcagatacgactttaaactgaagcgaacatcttggcaggggagagactccctaccaagaattggggagaggaacatacgcatgaaactagcgtgaaaccgttgaccagttcactaacgcaaagaccagttcactcatcacttctagtttcttgcctttccaaacaaacacacgtgtgtcagtatgcaaccgaaagctaaaaaagaaaagaaacataataattaataacagtcgtgtaccccagttccaaataccactgtataaacggtgccagtgttcagctgcatcagacagtgacttcactatatcgaagttccgtagaaatgcataaacgacagccggttctcttcatcatatatatgtacatctctctctctctctgcgcccaacatggccgaacgaatcgtagcagtagccggcaaaaaaaagacggatcagtcgcgcggtgccctttctacgccgtcgtcgtgccggtcggtggttgcggagtgcgcctccgcccctgagtcgccgtcggcggggcagcggctcgcgaggacagcggggcgc

SEQ ID NO: 118 - DNA, 3000 bp, Zea mays
tctttgcgccgccgcagccccaaaccctcatcccccatcaatctcaggggcgccccagccaccccacccttcactcacctaaccatggcggagcgcggcggcgagcgtggtggagagcgcggcgggttcggccgtggcttcggtcgcggcgggcgcggtgaccgtggtgggcgtcgcggcggccgccgtggcccgcgccaagaggaagagaagtgggttcccgtcaccaagctcggccgccttgtcaaggagaacaagatcaccaagatcgaggagatctacctgcactcgctccccgtcaaggagcaccagatcgtcgagaccctcgtcccggggctcaaggacgaggtcatgaagatcacgcccgtccagaagcagacccgtgccgggcagcgcacccgcttcaaggccttcgtcgttgtcggcgatggcgacggccacgtcggcctgggagtcaagtgcgccaaggaggtggccaccgccatccgcggcgccatcatcctagccaagctctccgtcgtccccgtcaggagggggtactgggggaacaagatcggacagccccacaccgtgccctgcaaggtcaccggcaagtgtggctccgtcactgtgcgcatggtgcccgcgcccaggggttctggcatcgtcgccgcgcgcgtgcccaagaaggtgctgcagttcgctggcattgaggatgtcttcacctcgtcccgtggctccactaagacccttggcaacttcgtcaaggtactacaaagacgtctcgctcttatccgtgttattgacgtgatgcttctatattactcatgtgaaatgtttagtacgtactagacatatgcaatggctgcaacttagcagttagcaccggtattaatgagtgcaacgatgagttagtcatagtatattgctgctggtatctgaatgggttcatgtgaaatgttgaattttttgcactgttatttgatcatgcagcatatgcgatatgtagtgagtgctgtttttgtactttcacttcatcagatgtgatcgattaacttggtagtacttcagacattgttgctcgtacataattatccacttctttcagtccaaagagatggttactaatgcgatatgatagttctgtttttgtgattttgaagttgcagtggacacactgtttgtgttatgatatattcatgttaggttctaattcatacttggatgtactagctttattatttttatgaacttagttcgtgaatcaataatgttgtctctaaagttctaaacttaggatctttaaaaaaacgttataaatttacataacatcactgtttagtcaaatattagtagctttgaaacatgaagtattgaaaaattctgaagtccgttctgtggctacatttacatattagcatatgttattattatctttggttgtatgcaatttaatcctacattcttgtagatgtctattcagagccatgtccaagtcatttggtttggtttggttttgttgcaggcaaccttcgactgcctgatgaagacctacggcttcctcactcctgaattctggagccagaccaagttctccatggccccgttccagcagtacaccgacctgctggcaaagcccaccaagggccttgtgctcgaggccccaactgagacagtagaggcttaggatggtttgagtggagagctctactcgtcgggtgcttgtctaaatgcggtatctatattatagctaagaactgccggagtcgattttgggttctgttttgtcctggatgctgttctgtactgtcaagttttggattatgctatggcactttttatcgatgaatgctacataatgatctcatgatagtgtttttttcacggtgaaggcttttggaggcttgtgtttgggtgacttgaatgcagttctgctgctaagtgcctctgtgctgtgaatgtgttgcgtgactctgttaagtagtctgctccattgtcatttgttgcagtttacttaggctatccgcaaccgttacccctaaatttttcctcctgtatcacttttttcccctatttttcccctattttttcatttcccgcagcggttccccctaaatactcctctataccccactacaactataaaatatcattttttatatcaactatcaattttttatctactaacaattactcgtggacccatagcacagtgtttagggtgatgaatagtgacacgctagatctagagggagagagaaagggaccgacacgtaggggatgctgtagaggcaccgctgcggccgtagggtgtcccctacagccgccatgcaaggggagggggatggcgagggggctgcgttgcgcacagccttaggcctgattctagtgtttcatagctggtcatctgattttagacttatctatcttttttatcagcttcttaaacgttttaatttggctatcttgatagtcatgtaaagttttggattgtggtactgtattgcccgtttcgtttgagtggcttgaattgtcctgtgcctgagccctgagcggctgagccctccttttgggcttgctttctttaccctgcggccaccgggcactcgtgctcccttttggcgtctactcttttgctgcgacgaggtgcgcgaggggaactaacatttgcggtcgtaggttcgccgaacctgcccatgacacgcggggggcgcgcgggaattccgctcagaatcctcggttttctccgagtctggggctgccgcgcgccctgggccgcacaaaattcggttggtgagaggaagtgacaggcagggcagcgcgaaagccagccacggggacggagcggctagcgagcaagcgaaacagcactatacaagtcgtcttcttctccgtcccttgggccacctggtgttcttctataccacgcgtccacgccactgctaagctgctccccgttcgccaggtcggcgaccaggcgaaacgtgctgctgcaagaagaagaataggtacacagacagc

SEQ ID NO: 119 - DNA, 3000 bp, Zea mays
ctccggctgccacattggcatgtacttagggcgctagctctccctccgctagacacgtagcactctgctacacccctcattgtacacctggatcctctccttacgactataaaaggaaggaccagggccttcttagagaaggttggccgtgcgggaccgaggacgggacaggcgctctcttggggccgctcgcttccctcacccgcgtggacgcttgtaacccccctactgcaagcgcacccgacctgggcgcgggacgaacacgaaggccgcgggacttccacctctctcacgcccgtctccggccacctcgccactccccccttcgcgctcgcccacgcgctcgacccatctgggctggggcacgcagcacactcactcgtcggcttagggaccccccgatctcgaaacgccgacagcgctggaggttgtactagctccgttccagcttttgcggagattttcgaggaaggcttcttctccggtggatccgctatacgatgcagaatcccttcttcgtctgccacggacgagatggttccgaagcaaaacacggatccagagcggagagcaatcttatgctggaaaatgatggccattgagctagcttggatcagtgacacaccccctacctggcgcgccagctgtcggtgtttgggacccgaccgcgcacccagggttacccctcaaggtgcttttgggtaagatggtgttaccgactgtagctcgatagttcgtgctagacgcacgagagacgatagacaattttatataggttcggtccgcttagagagacgtaacaccctacttcctggtgtggatctttatgtggtgggttacaggggaattctctagtatgaaggatgctagagaatggagtagatgactaatgagtgacatgtcttttgatggggtgccccctatgccttatatactcgaccgtggggcgttacatgcgggtatgataacagcgtgcacctaagtaatagtgaactgactgaatttatcttcctataatcctaccgacttatcctcgtttagttccgacgtctaaggcgctgcacgggagaatcggatcaatgctatggataatgcttaaatccaatgagccgtccgggctagagtatattcaatcttgcgtcaattcattccgtctgcgactcctcccctggcccacgaagggatgaccttgcaaaataatagacccaaagcttttcacgaggccttctagccttctagtggacccggaggatatctgtccccacatagaccgaaaatgagagtagaatagcatggtcatctatcctttttcttctcgttgaagtgcaagaaaaatgaagcaagtggcctcctcactttttttggtccacggaggacatgaacgaaaaatttaagaacaacattttacaaaaaaatgccactattgcgtattgtggccttgtattgctcggcctttttctcggttggttgttgttagggatggcaacgagcacattttacccgcgtgcccgcgggtaaaaaccctatagggtgcgggtttggatgtgagtttgtacccgtgggtacgggtatgagtttgattctcaacccgacgggttttttctcgtgggtataaaaatgttgtacccgtgcccgcaaacccgtatacccgctcgcgtgggtatatatatatatatatatatatatgtatatatatatgacaacttgtgggtactgtgcccgcgggtgccataaacccgcgggtagcgggtgcgggtatgagtttaacattaatctcgcgggtacgagtttgtaatctctatacccgcgggttttaaacccgttgccatccctagttgttgtagcaatccgcgaacaaggaactcatcgcgagtaacatcgaggagagcatcatgtcgctagagtcttattctctgatctcacgagcatagtggtgataatgtttttaaaattttatattataagatttaaaaatcagatcggattaggatcatatcatatttctatttatttttaaactaaaatttatttaagactctactattttataaagaagtgtttgtatcacgattcattaacaccacgataatgtattggaaaataatgaaaacgagaaacagagatacaaaaaatgaataattttcattgatattatgaagggtatcacatatataatatatacatgaggaaagggtgtaagtcaagagtcatattcgtaggcaagaaactgtggcatcccttaaaattgaggaaaatttttttggtgcagccggctgcaaaccaggatgtttacagcttctcacataaaaaaagattaaccccacctacagcagtaaaaacacagctaaaacattatctgatagacttgtatataggatcaattctctttttttgtaaggggctgtaaatattttggtttgcagcctgctgcaccaaatttttttcctaaaattgatcacatgttgttttcttcagcatcttgaatccatacgaccataccagagaccagaaggctcctagttggtggatgcggcgagcgccgttggtcaaatcgcggtcggccacgtctctcctccactggccgtcccacgggccgcggtcccactcccactcccacccccaccccctcctggccgcgatccttgcgatgtggacgcttctcgggtcgacacgtctgcaggcgaaccccccggcctcggaggctcggacttccagaaccttcctgccgcttcctggccacgaatggccgtcccgatccagcgtcccagcgcgcgccacgtgtcagagatcggccacgtcggcgtccgatgtggcgctcccgcccccgaagaaactgatacggccccaaccctcgcgtctcagcctcacgctcggaagagtaagtggccgccgcaagcccgcaaccaacaccaacgctttgctcgcttgctccgctgtccgctcccgtcggccagcgatcgaaatcagcggtggattcggaggcccaggctcccggaggag

SEQ ID NO: 120 - DNA, 3000 bp, Zea mays
agggctacagtttgcatcagggaattataaggaggaatggggtgatttggattggagacaactctgctctaaggactaagttgatcacagctttacatgacagtgctgttggagggcattcatgagtgcatgctacttatcacagagtgaaaaaatggtttggtggaagggacttaagaatgatgttactcagtttgtggggcagtgccaagtatgtcagcaggctaaaagtgaaagagtgcatccaccaggactgttacagcctctgcctattcctacaggtgcttgggaggatgtttctatggattttgtggaagggctgcctaaatctgaaggttttgacactattttggtagtggtggacagattctccaaatatgctcattttatttccctcaaacatccatacactgctcaaggggtagctcaggtgtttctggacactgtggttaagcttcatggggctcctaaaactattgtgtcagacagagataaagtgtttacaagttatttctggacacatttgtttcagcttatgggagtgaagttgctgttttctactgcatatcatcctcagacagatgggcagactgagagggtgaatcagtgtttggaacaatatcttaggtgtgcagtccatgatcatcctcacaaatggaggcagtggttggctttagcaaagttttggtataacaccacctaccatactgctctggattgttctccctttaaaattctgtatggttatacacctcctgtgatggctgttccttggttgagagaggaaggggacagggatgttactacctggttgcaggaaagacaagtggcctctgaactgcttatagagaggttggcacaagctcagaatagaatgaaacaaatggcagacagagggcgaactcctatggaattccaggttggagaatttgtgcttctcaagttacaaccttatgctcaaaagacagtggttaacaggccatatccaaagttatcctttaagttctttggtcctttcaaaattgtggcaagaattggtgatgtggcttatcggttggagttgccagaaaatgcacagatacaccctgtttttcatgtatcccagttaaaggcatttcaccctaatcatactccagtttttgctgagcttcccaaggtggcagatttgtctggtccagggatttggcctgagaaaattgtggacagaaggttggttcggaggggtaatcatgcattgcctcaagtgatgattaaatggtcaggtttgcctgtttcttcagcaacctgggaagatttttatgtggtcaaaaacaggtttcctgatgccctcgcttggggacaagcgagttctgttggggggggggggaaatgtaacgactgaagcagaggtgagttcggtgtagtagtagatctggagatctatgaggttctagaagcattagggttaatctgggccattgtgtggcttttctttgattgtaatctggcccatctaatggcctataaatacttgtactgataaaccgtcagagatgacgaattgaataagaaaggattagccacaaacctgtctacttcttcttcctcgccaccgaagcttactaggaaagctgtcggttcctgctgtcgcggctcacgtctagggtttggcgaaccctaggccacgggtcgtgacagactgacagcatgctagctgaacctagtgtataaggatttcctgaactgagaaacagtgagattcggtatacttacaagagttcgcacaccataacaacggaatactggtcgtatgttatttaaaactagtttaatccccgtgcgttgcaacggtacccaaccatatttgatgatattgattgggtgactaatcgacacttgagagtcttaatagaccctccacataaaaataccataataaatgaatttaatgtcgaaatgaacatattgttcatatactagatattgaactggtaagacatagataagtacaagtatgccaacaagatcattcctgaaatactaaatacaacaagtttatcctctaatgattaacatgcttactgaaataaatacttgctcttgcctttagagtatcacatcaaacaataaaaacattttctgctttttacatagtcttgtactcatctccaattgtatagttggtttcacttaaaattcaatgtgcaacggcggaagaagcggacagaggttgttgcaaaatggacggggtttgttgctagagcgacagctaccagaacattgttgtgcgaaaaaataggatagtgatgagatatgatctgaaaccgcaggttgatttcaaagaaataagagattatttataaaaagatgacgtgagatgaccgttgaaactgatgctttaatatggcagatagaaaaaaataaaacgtggaacactgtagagttaatcggtgtgaaaacgctgtagaatcacatgcatgtacaccatttaaaagaaaacaacaatactgcatcccaacaaatggggcattattagagtttcagtatgagaaccctttccctccgctatacagtgtaatctaaattcctgctatattttggaaagctgttggaaaacaaaaatgaaagattcgttaatttcgcattattacataacatcttctatatatttcatatactgcgctgaaactcaaacgatgagttttgagatgactcctcattgacatgtccagcgggaaatctgaacttttgcaagacatgctcatgaatcgctaaacaagcaaacatttgtctgccccacgcagaacaactacccatgagcacaagaattttccattttatttagaaatgcattaccgcttaaacccacacgaatgccctcctccataaactccctataaatacataccctccgtgtcagccctaacacagcaacgcaagcaagcaattgtcaaccgactctatcttagctctctttgcaagccagtaggtcaccactcaaaagcttgtgaagcaggtgag

SEQ ID NO: 121 - DNA, 3000 bp, Zea mays
atagagattttttgtactatttaattttgaatagcaaagaaattcatttttatagatgtgttccaatttcctagttaccaaactagtaggctgactccgtcggcttgaataaaaactgactgagatttttcggtattcttgttgtgactaggttttatttgtttccttctagaattatataattcagcttatggattatataagcacgatctgtttataaattatcataatctaggtatacaaattatataatggacccaataatttgtgttgtttgtttatttcttaactttctttaaactggattataaaatctagagggtgattgaataaactaatatacccttagacaacaacatattcttaaaactataaaaaatcgcttatgaatagaaggttgtgcgctgcgcacatatgtgctgttctggtgtgggggagtcgaggcacaaaggaggagaggagagaagaaataaaaggctattagttatttttgcgttctaaccaccaagaagagctattctaccatttttttttctctaaagaatgactttatcaactgtttttcaaggaaacaaagataaaatcagaagaagaaaaaactgctttatcgaagaatccattgttgaagctattttagctagagttactctaccaaacgagctctgtctctatatataatatactccgcctactaactgtagccatactcaactcgtcatttgcatctgctacattattcatgcatcaccgagaatattaaactggcaatcatggttcatgcttactcatcagcacgcttcctttccttccttatacagcagacaaagtttgccatatgctccgtcgtccagtgacgtcaccacctcttgatgaatggattcagtattgtccggtcgccgttgagatggtgaaaatctatcccagagatcttattgaatacgtgcgcggacgaggaatcgacaagagatgtggatcgctgcctctgcctcgctgccgcggcgtggtgtctagtgtaccaaatccggacacgtacacggggcctccggactccggagcgtgtccggccgaacgatcaccagctcggcacccgcgcgcccggccaaatcgcggcgtacgtgccgcctgctgtctccggccgaacgatcgccagctcgcgcgcccggccaaaatcgcgggcgtgcggctggcctggcttggcctggcgcgtgtggtgtgcgtccgccgcccggtctagttctctgcctagtatatatgatcagcagcccgccacccgcgcgcgcgccgggccaaatggcggcggcgtcgacgggcttggaaccaggccagaatccagcgcggcctggagccgggggcgctgccgcgcgtcctggggcgctccgacccggttttggattcagtgactaggtaggcgggtgggagaggggcgctgccgcgccggaggcgttatggcgttgcgcgcgcgcgcgcggctgttggactggctggcggctcgtcgtcccgtccagaacgaactcgccgtacgtgcgcgcgcctgcccatggcggcgtcggtcgagcctgtgcacgttcccgtgagatccttcaacgacgacggcggcggttcggccgcggtccggccttggggcggcggaagcggcgccgaacgctggtcgggtgcctccgtactctgtagcaagtctaggctgtctagccagcttcaatgcggaggtccggctgctggactgtattgatctctagagacacgacgaagaatcaccgtacgttgctggccattgccaagaaccgcgatattcatattgtaataatagtagaacgagcagcatacgtccgtgtccgtccgtaccaaggttggccggttgggttaaggcgtcctcgggtaatcaagtcgggcatgcatcatgcatcccgagcctaacttttttttgtctcttcccgatccagtttgcaggctgccaatgccccactcatctgcccggccgcacgtatgtcgctgcacacggagtaggctgtttgtagacacgaaagcagctagcagcaggttaccgccacatttggcagcgcatgcacgctcacgaggcaggtattccaacggccctagtcatgcatgcgttacgcgaaattgaagccatgtcgtgtgcatggaatggacgcacggatggatggactttagcgtgtttgtgttcgcgccagcaacttttcaaagaacaccatgacacgcagaatcagtagtcattttattttttttcttaacagagaccaaaacagaagaagatgctgatacggttggagtcagtcgaatcatgcatggttcatatgattcatgaacatcatgcaatgcatgcatgtcccaccccctgcagagacgccacgttgcaatgcatgcaaacctgacctgacgtggtgacgcccccctaataattcactgcctcatgtgggctgtgggccatcggccatgctgtcacttgtccagatacgtgtcatcagtcattaatctgcctgccctaaacccgcgcccggtcgccggaaaccacgtctcgcccaatctaaaaccctttcccgggcggcaatgatacgcattatattatcctaaacgcaagaatcttgtaaattatctttttgattgaggggaattttatacattatgttagttatttcgacagggggatatcgaatcattgggcaagtacgtagtgtgtgattcatcggagtcggggcatcttgaatcctggattgtcagtcaaaatcaacctccctgcctgtgcctgcctccatctccatgccaaaacagcagcagagacagcgtggaatattcggatcccttggggaggctgggacccagtcccaccacctgaacaacacgaagctgcattaaaaggcgtccggcgggtggagaccagagcagcgcacaagcagcaacgccaacgccaacccaacccaaccctaacccgatctcaccgaggacacacagacaccagaccaccggagcggaccaagtacgagc

SEQ ID NO: 122 - DNA, 3000 bp, Zea mays
gaggcggagaatttggggattggaagactaaacctaaactagactagaactactcctaagataaaatgtaaattgtattgattgaaggttcgattcgtcgtctcaaatcggccgtagacctctctatttatagaggaggagggctggaccccgttacaaacaaatttccgagtgaatcccgcgaatttagctaacaaccgtagcacaaaactcggaaccctaaactgctctgcttacgcgcggaccgtccggcccccaggcgcggaccgtccggaccgtccgccctgctcaaaatgagctccaacattaaccctaaaattaatattagaaaaataatcgcttttttgtcgctctaacatgtcccgctaattttagtcgctatttcagcggtttggaacaaagccttagcatatacaaaacttcatttttttctatatttaatagtaaatgatcattagatataaaaaaattgtacaagactaataagagggtgcatggcccactcctcccctccccgcggttaagatcaagcaagttccaatcaagctttacttcctcagcaatgacagagtggataagaactagagtttggcacgtgagggcagaagatgacaaggaacacgagcaaggaagtggttacggttaggggccatggttctaaacaccacctaaagctttgttggattgcgtctgaatcgaagagtattgagggagattaattccattctattcaattttgactagagatagatttaattccctctaatccacttcgatttagacacaaccgaacaagccctaaggtgagaatcatttgaaaatcctagggcagttaggtccatgtgaaagcaataaggaggatggtaagcatgagttaggggtgaccttgagtcagcgcatcagatacctctttgcctccatgccttcacgctccaccaatggaagagaatttgattcccttctcaaaccctaaatcaaagaataacccccacgaaattccacaatccgacgaactttgttgggcatctatggagtgcgacttcaacaaagtcctttgccgatgttatgagagacaaactggctcccatggtggttaagctacgagattttttaccattggtggttgtcgcccacctagatggcttgaaggcagcaaaagattgttgagcggattttgtgatttttattgacttcgatcatcaattgtcagaggctcttgtggtcatccatgtggaagattagtaaatgccaactctagtaatatcatggctttgttggagtgtttcattagtgcgattcttatagaacccttattgtaggctaggcataataccaattaacatgtgaatcacctagtttggactaaccataataaggatgtcggttgtcagcaagcaaccgagcctcagggataaagatcatgtcatcacttgtctcatatggtttacactccaaactatgcttccagttacatatacttgtagtatttcatctacttattgtgtaacattgtttctcttatcatcaagtagcttaatcatatagatctttcacaagctattagtgtatttagaagaatagtctaaaacaaaactaaaacatgaaatcgcttccacataatcatatatattgcctctagttgaaataaaaaaattgtacaataattccttaataggctatttgacctcgtctagccatctaggtcctttcgcatgtccggtgccttctaaaaacttaagtgttccgtataaaacgccaaaagtctatgatagagacaaatagtatgatattgtagcatcttcattattgatgatgtttgtggctttcatattttgaattttattcttactgttgcgattaaaactgatcatgtctactaaaatattgataggcataggtacctgatggatggatacccattatccttgtgggtgacgggcatagaataattttacacgtatgatggatacaggggcgtagctatgtaggtgatggtgaatggacatgcacccacgaaaattttaaaaactagtgatttagaccaaattttcactatatacgcaccatctatgagttattactatacaccatcaagtcatttgcaccctgctttggttcgctttagcttcatcgctggatggatagtggatgtgaataatgatatctttttttctctggtgaccatgagtgtgtccttgtctctgcccgcatatcttagtcgttgtcatccctgcagactatgaagcgtccggagacttatggagtgtttgtttagaattataatatgctaagattatataatccaacaacttttaaactaataatctagacatattataattacaaacaaacgcggtaacgactgttatgcaagcagtccttctgtgcaagcgtgcaatcaaaccatctgatccattagattacgatccaaccacagatacaactatgatttgttagggagttttttataaagattattgagctggtggtggaagggtttaagtgttaaatgtgacctacggttgaatcacgatctaatggatcagatggtttgcttgcacgcttgcacagaaggactgcttgccaacaaacgcaacctagtagtcacagcaacggtttgatcaatgtggacgttttttcttgccatttcaaaattcagccccgcgcgtgccagtgggcgtgcatatcagattctcaggtacggccgttccttgcttagcacaaaagcatagtttgaaaaaccaacggctatgtgtgtcaacggccactaccaacccgatccaaacagcccatcaaaagaccataagcatcataaccaagcagtgacccacgtggatctgccacaaagcccatcctcaagtctcaaccttaacttcctcgatctgccacaactacaactacaagcaaccagaaccatacaattcttgccaaagcagaatctatttaacggcgacaacacaaccaaagcgtggcattcttccttccttctttccttcacca

SEQ ID NO: 123 - DNA, 3000 bp, Zea mays
caccatccgctcgcccacggcctcctcctccctcctcctctcgatcggttctagagcctctcgcttgtcgttccgtgatgtgctagaaacagaaactaatgtagtttcgttgacctcttccaacgcttcacggaagcgttccccgcgcctccgtgtgcggcagcacctcgaggccgtccatcggcttccgctcgggggcaccctgcatagagggagagggagggagctctaatttcctctttcgttaaacagtgtttctaaccgtgaaagtaactattttttaagtttttaattacatgataaccatttgtattacgatactataaatgttgtatactttttttaaaaaaaactctaaaaactgatttagaaaaatcagatagatcagttgcagtgtatatggtgagctgaatagaggaatgaccgaagagaaggtgaaatgggagtacaattttttgagggaggtatttaaatttgaatataaagtacaaatagaaggatttaggaaagggaacgttggattcagccttatagtaggttggattgggccgtttttgtgcctttgtggcgagtagagatgtcaatgaggaatttcccatcggggattaactcccagacccgtacccatgagcacagacccgccccatccccgaacccgaacccgacctccggtacgaaaatcttcccatacccatccccgaccgggtaccaaatacccatggggacccgtacccgacccgactattcaccatttcagaatttcagcatatggacataacacaattctgcatttcagcatgcatattttgtagtttcatcaacatactcatgcaaaataaatagtgtcttctagtagccacatgtccacatataacaaatatggtcaaacagtaaatagaaatatctcttagtacatgttttatcatttaagcctggatgctatagtaaatcgggtaaaacagccccatgggtaatcgggttcgggtttagccctcccaaacccgtaccctccatacccgatggggaaaagatttctcccaaatctatacccacatctatacccatggggatcaattttaacccatattctaaccctaatagaagaattccccacggttaatcgggtttcggggcccattaacatctctagtggcgaggaacatgaactccatttcggcaggtcctccgtagtaggtcagaactcagaagcattggtgatatctgtgggtcgttcagtaccaactcttcaagtggatctatacctgaaaggttatgaaaaagaatcgcatttttcttggcatctggacacccaagttccaagtgtgtagtggaggtgttctgactcatgaggtcataatgttattcttgcagtatcactatttgacagatattatgtttgcgtatcgatgaagcgtgtctgtagcaattcctctgttacttgtacctgccacagacagaaaaaaataaactagagcatggcctgtttttagcatctttgcttctttgttattttgcagagtactctgtaccttgcctctttgcttcttcgttaatcgttagtttgcagagtactctgtaccttgctatcctgacctactgtacatcagtacatgtccgtgtcaaaaaaactgtttttgcgccctgaactcataagcaaagctcttcatggtccgtctgcagaacccgtccaacaaaaccgagatcaactgtgacgcgacgctcaagagcttgtttggtgggagggacaagatcgggatgatggaggtctcgaagctactgagccctcacttcctgaagaactagcaagcggtgcatggagccggcggcagcgcttcgcggttgatttgggaaatgtttagtctgctaatggcaaatctcagtccacgttcatcccagtctttgattcgtggtcttagcgtcatgttcgtatgcgtggggttgcgttctttccgatttgtatagtcggtctgcagcatgttatatgatatgcttgaagtttgcactcctcccttgtcatcgctggatgcctggataaacaaaaccagctgttgactgactttgtaagttgtacctctgttgcttacgaaatattacttcccttctcgaatatttgtcgtctgctatttcatttttcgaactaaaccgcgacaaaagaaaaaaaagaacggacggagtatttattattagccaactgttgttttcttttgagggcttttggttcagagaggagttgaaatctaacaaatgggagaacataggtagtgtttatttgggattataattcatttatattatgtaatctaacttattttgaactaacacttagaacttgtttgtttgagattatgatctgactagattatataatctaacaaatttagattataaccttaaacaaacattttcgtttaaaataaattagattatataatttatgcaaattacaatatcaatcaaacaggcccatgtactaccagcaatgcccgcgtatcttaattctggtgtacaaatagctgacgtagattcgattattgtggaccctgtatcgagtccgtacgtggtaaaccggtggtgctcggctgtcgccacagccactgccgagccacttgtggcgggtggctgcgtggctggtggttcggcctcgaagcttctttctcacctcacaggtcagtgtccgccgatggggtcactgctgatgcgtgatgcctccctcccgcgtcagcgctcctgtcctcacacgccccggtgcactgcacctggacgccttcccggccctctcccccaccgataaataacccgcccctcttcgcagcgagatgcaacaaggccacatcagcagagagcccagcaactgaaaaaaccaaccatcgcgcgggcacggttgcggttgctacctcccgatcccgtcctcccgcaagccaagctctctctctccccctccccttcagcacgatcggagtccaagtccatcccatccagacccactcgacagtcgacccg

SEQ ID NO: 124 - DNA, 3000 bp, Zea mays
gtaaccaacttagcgttggtggacacctagaggatatgaattatcctgtgaatggaagacattcacaacctagctcagtgcgcactgatgaggctaggttatcggaagcccttgattctcgttttgggatttcacgaggaatcataagggtacataaaaatgacttttatgtcaactggagaactgtgttatttaaaagctacaagtgtcgacacatacatctcaacaaattgtatatgcactccaagtgatccaaaagactatggccatagcagagcacgagtatgctcaaactggatcttgttgagtgatacaatgttgcagagatagccttgctcaccggaaagaagtgttaagttattttcacttcaaggtatcttactgtggatacaagtttgttttcatggacttggaaacaatgaggtggtgagaaagcatggctagtagcaactgggtttatacgcaaacccaagcattattttaatgctataaattctcttctaccgtgagtgataaaattccgatacaatacaaaaggcagtaaatcatctatctgtgcagttgatagatgtagtgacaacatatgcatatgtggtcactgaattatggtatttatggagtcttgaaggattccaaatacataataaccaatcacaaatttataatgcttggaaagtctttgtgacttagagcatcttggtcaaatatggtacattcgacctagtgaatccttctttctgaaaggatacacaaagtatggtatgttcagtgtaaatatgtgcaacatattttaaacatacattacttatcgacggagttcaagatagagggtatgaattgaaagagatttccaattcaaagtaaactatcttaagtatcttggatacaaagttgtctatatccaacacatattgaagaaattcaatatgaaagagtcatggttatttgattctttcagatcatgagatgtgctattgtatcttgcaagagcatccgggcggatattgctttgcaaagatttgctagctaacagcacatgagatcgagttatgatctccaagtatactcatgctctccttatgtttggatatactgatcttggatatctatagaagatccccaggtacaagatcaatgacatacttgtggtaagttggacctactgtttgataaatgttgatcaacagagattaatggtcacttacactaatcattctatagtacacttcgtgggattgtacagaatgatatactacatactgagggtatgtggtggtcatgattttatatcattgaccttattatctatggagataatattactttgtgttgtttagatgaaaaacaagttacgaactaagtccctaccttactccacatttttaatgtgttatgagaacaggtatgagatgacttagtgatttgcaaagatcagggggagttttctcttgatcggaagaacttgtttatacatcatgttgtactcttttctttgcatgagttttcccctgtttgggtttctcattcaaagtttttaacgaggcaacatcaacacaaggcctatgtcgtatcatctattttctcgtaaaggttttcgaggatgatacattatggcatagttattgttgtatttgaactaggtgatgagtttatctccctagagttcaaatggatcaacaatagagtatgactactctccttatttttcccactgggtttttaaggagactcagctgatatgttgatttctcagattttctggcaagattatcttggagaaatattagcctgagttatatgtctcatcatttattttccccatgggggtttttgagatgatagcatagacatattattgttctttgggctagaggtccattggagaacaatgtcgtactgtggttcaattgaaccactgaccattatccataaggataaattgagcttgtgttgttcagatggaaacaggaaaatggagatatgaatatcttgcaaacaaagtcttgtgataatcttgttgatctattcacaaaatctctaccatactccacatttcagaaatgtgttgaggggattggtacgagaagacttaagtgcttgcaggatcagggggagtaattctctatgatatttgacctgttttgaaccatcatattacactcttttctttgtatgagttttgccttatcgaggttttctcatccaaagtttttaacgaggtaatatcaactaagctatatgtttcatcattaattttccccactggggtttttatgaatgatgattacaggcatatttttcttttggaggtcgctgtgagttctactcataatccaaaagacattgtgtactccttatttttcccacagggttttttgaggagatgatatattgaaagacatattgcagatgatcaaatgacgttggattgatcaagggggagtgttaagaaaattgtaacattttctatgatcaacccaatgggtgcctaccaagggacacacccattgacattgcacccctacacatgtatatatatcaggatgttccctgcaataatgagttcagtcatttgtcattatctgtctctctccactgagattcaacagcatcaacccactggccctgctgcgtccagccaggcccctcgcctcgctggggcgatccagcgtcacaagcccacacgttgacacgcacggcacgacgcgccccggccaatgaaaacagcgcgacgcgcagccatgcatattcagtccccctccccgcccgcgaccacgtagccgaggcaagcgcagccacacaccaccccgcgaggccacgctctcctcccgcgcaccataacatcgcgctcccgcccgctcgcccggcttctttaacgtgtagcagagaccacgcaccccgcccgtctacctccgatcccaccagctgatcttttcctctcttctcgcctgccagttgcaccacagcatctgtatcgtcggaggccgggactgcgtggcc

SEQ ID NO: 125 - DNA, 3000 bp, Zea mays
ccgtttggggaagaaggagagcggggggtttttgcaagaaataatccacatcacatgacaggctgcggggggttaagtgttaaagtaacggtgaccatcggatcgtggttggagggacaggatgggagatgtgcatatgtgcacagccgtaggcatgtgcataagatacgctgccttcatcttttgcctccctttgccgtccagctcaccatgcgtgcctcggtgcctgtgctccggttctatatgttatttcgcggtcgtattattctaaatttttattttaaggattggtttgggaacaatatttttctaaaaaagtcatattttttaaatagaaaatgaactaatttttctagagaaaataaaaatttctttagaaaatagggttcccgaactaaccctaaatagatattctatccttatcatataccacaattctttacaatcatacttattactctgtaccttaactagcatcgcggtctccggaccactcttagccaatcatagaccaaaatgccacatcggagagagatttagagtacaactgtaaagactctatatatgacgttcttgctgtcttccatgcgtttagggtgtccgtcgaggtactcctgcagtagtttcttactccatatgtagttatatcctcatagcgtgttgtttagagttccccaatgcggacattagggtatgtgcaaccccgagacttgttgagttttctaagtataaaagacagttaagagtctgtataatacaaacctgagacactgtatcataaataaagctaagagacaatatatagaaagtcaggaaaagacggacacttcgcgaagagcttatctcttgtattttttttcttcagataaccgtttagatacccactcaagaaaccacaaattaaatgatgttgtacatgctcttaccactttaccagtgttgtgcgatacatatagttcatttaatttcttcttggtcgttgccaactgccattccagtgtaacagtgctccatcggatcggaggctgtttaattagcaacaaaatattcttagcctctcgccattaatctctaagaaacaccacaacttcacaaaaacagtatgcattgcttcacagtatcctctgagccctgacggtacggtgtccgtcctttcttgtgtcgaaattatatgggctttgcctcgtgtttctcctaataacccataaaacagaatttttaaaaaggtctacttatacatgagtttaattagcatttgttttaagaattacaaaaacagtgtgcacattgaagcaaagggtagggccaaaaatgaaccgagctcgggtcggtgtagctcggtcatatagcgagctgagaaattaggtttggcttagactcgttcaggctcgctatccgatcgcgagccatcaaactaagtctcatttagaacataaattgtatatttttattgtatataaaataaaaaatatatgtaccaaaaatttatcaacatattttaaactacgtatatagcattgggtccataaaaataaaaaaaacatagcactgtatgattagtctggcccaggtgagctcgagcgaacctccagctgtttttttcccctgccatctcttctcagcccccactccccacacagcagttcacgataagacagaaaaaggaccggcaactgttcgccggcggggcgttgtgtgacgttgattcgatcacaagggccctgcgggagaccaacgaaaggccatgattgtttcagcatcgatgctgctgaatgctacgacgatctctgatgggggatggagtcaatcaagcggagacattgctacgaggcaggccatcatggagattgtggcaactgaggcccacctgcccaaatgttttccgtgtgacccccctcgctcactcatcagcaagcttagcatatatgcacaactgttcattaatcaatacattgaaaaaggctgcacgcagcccgtgttcttttgatccggaaggtcagaggtattagcaatcagtgtccggcatccagacactacgtacgcacgagtaattggagatcctagattagaataaaccacctagagagcttgatgctttctagagctgaactcatccaggttaaaagcaaagccaggacttctcggggctctatgtcagattgtcagtgttgcaccttgtactgatcgggagacagccaggccaagcaaagtagataaacaaaccatgtctacgattgaggcattgatggtaccgcgcacggtgcacatggttactttcaagctagctaatgcaaggcgctatgcactaatgtccccttccagagaatcatgtgccctgttaattggcttggctcaatgctctctaggggcaacaaccgatgtttatatattgctgatatatgcagttatagagaagagagaaaatatggatatacatggataagatcgtaattcacaactaacccaccataaatcacagtagggagacagagctctctctaatatagaaatagacgtaacaaactgcattttcatctaataccctctcaatcacaatagagaaaccctaagcccaacacagctcaagtaccttctttttcccctcgtttatgcgttatcatgcagagtgtttctgtgatccacaaatatccctttctgtacagttcaggtaaaccagccacgcagcgcccagtcgtgagtcaccagatcgggcatgcaaccagcttccttctacttcctgggccacacgcagcggttattacagggaggcagacgcagcgccctcgtcacgtctgaactctgaagcctgagcacgcccacgtcgcactgggccagaatctccctctcgtttcagcaggcctgctttgcaccacgtagccttgttgccaccacacaacagctgacgcgccgccgctgcttgctggtcctccatatagaaaggccggatcgctgggcgaacctgtaagaaccactttcacctgaactcctgaagcaaaagca

SEQ ID NO: 126 - DNA, 3000 bp, Zea mays
actcatccttcgccgtcgctccgagcagctctccgtctttggtataatcttcactcatattttgttcaccaaagagggagaaagtagtaacaaagggcctatatttcactcacagtatccgtttttggcgattcatgccaaagggggagaaagtattagcccaaagcaaaaggaccgcaccaccaccaattttcaaaatttgagttaagaaaaggttttgaaatgatgaatttttcaattgatatcctatttttgatataatttcaaattggaacaccctcttcaaaatctaatatctaaaaccctcttgaacactaagaggaggattttattaagggggagttttgtttagtcaaagaaaaagcatttgaaacagggggagaaaatttcaaatcttgaaaatacttctcaaaatcttattcatttaccttttgactatttgcaaaaagattttgaaaataatttacaaaagaatttgcaaaaacaaaacatgtggtgcaagcgtggtccaaaatgttaaaaatataaagaaacaacccatgcatatcttatgagaatttatattggtttcatttcaagcaacctttgcacttacaattatacaaactaggtcaattatgcactttctatatttgcttttggtttgcgttagcatcaatcaccaaaaagggggagattgaaagggaaataggcttacaccttttcctaaattgattttggtggttgaattgcccaacacaaataattggactaactagtttgctctagtctataagttttacaggtgccaaaggttcacaacaagccaataaaaagaccaaagaagggttcaaataaagagagctaaagacatcccaaaggcaccctggtctggcgcaccggactgtccgatgtgccaccggacagtgtccggtgcaccagggaactcaacgctgaactcctcaccatcgggaaaatgggaggccgctccgctataattcaccggactgtccggagaagcaccggacagtgtccggtgtgccagcggagcaacgattacttcgcgccaacggtcgactgcaaacacattcaatgcgctacagtgcgcgccagagtcagagcagcaacagacggcgcaccggacagtatacaggacctgtccggtgcaccaccggacagcccagaggccccaacagtcagagctccaacggtcaaaacccaacggccggctgacgtggctggcgcaccggacagtgttctgtgcgccatgcgacagcagtcttgcaacgaccacttttggtggttggggctataaataccccaaccaccccacattcagttgcatccaagttttccaccttcaacacattacaagagctataacattcaattctagacacaaccaaagagatcaaatcctctcccaagtccggaatcactccaaattaaatagtgactagagagagcgacatttgtgttcatttgagctcttgcgcttggattgcttcttttctttctcattctttcttgtgatcaaaactcaattgtaaccaaggcaagagacaccaattgtgtggtggtccttgcgggaactctgtgttctgtttgattgagaagagaagctcactcggtctaagtgaccatttgagagagagaaagggttgaaagagacccggtctttgtgaccacctcaacggggagtaggtttgcaagaaccgaacctcggtaaaacaaatcatcgtgtctcactctttatttgctcacgatttgtttttcaccctctctctcggactcgttcatatttctaacgctaacccggcttatagttgtgcttaagtttataaatttcagattcgccctattcaccccctctaggcgactttcacgatgcagggaaaacttatcattacctttcttcttattagattgaattagactatgtgagtgagtacataactcagtttgtccttcttcaagcttttcactcaagcttgtcaaagttgagttatatactaggagctcattttatagatcaaagactggtttacttactcatgaataggttatatactaccactagtaacaaacaagcatagaaataatagtggtatgatataaacttcaaattcatttggtctacgatcaatcttatcttggttggtcaaaggagagtcgtgttattcagttgatattctttttttcttaaagatctctaataaagtgttggtagatattaatatgttttttcttgactgttagaccgggttggtggctattttaatgacgatctcattatcacgtagcaatgacatttatgcgaacttgatcttatacctagcaatgttgctcttgtccatagaaattgagcataacaactccataccaaaatatactctactttgcctattgttagtgcagccaaattttgcttcattagatattatatagctgaattccgtctgcttaagatattacgtatccacatttcattggttggtaggtagccacaacattaccgggcctactgacctatggctctcagaagaagttggttttcctcaaaagaaaataaatgtagcagccagcaccacggaccacataccagggaggatagcttggtacgaagacaaagctgttggttgctttctaccagggagtaatgtctttcagtctaattttgcatcctaacggtttagatcttttcctcctgcttcgtgctgtgtggcgtgaaaagtttgtttactggtggctgtcattcatgctgcgcgctacgtggaccaaacgaacgtctttcgaatctaaaaatgaggcaggcgatttttcaccgcatttcgcccaaaaaaattgctccttccgcttgaacacacacacgtggccacactctgcccatgcataacagaagtttcgaaccatgggatgtagagtggaatctcttccctcgcaggataaggtgcctcggccgtaaacagagtggttgttccgcttcgtcccagcctctagttcttcctttcctccagagtg

SEQ ID NO: 127 - DNA, 3000 bp, Zea mays
cacgagaacgtttcttagccacttgactacaataacacttataactaagttttgtggctattagtgtttgatttttacaggatcacctattcacccccctctaggtgctctcacgcggcggccgagcgtgggggtggtgcgcatcagccgcgggcgcgcaagccgggggaggacgaccgcacgggggatggcgctgtcgtggggggaggggctgcacgaggggcagggaaggagggggagggggcgccgccgccgtggagagagagggagaggggagagaaaggggttgcgcgtataggaacaaaaaatggagaaactttatggacaacaatggagggaggctcacaggagaagacagagttcgctggagccgagaagaaaatcattgattggtggcgaaccgacggtcggatcgacgaatcaaaagcaacgagacgaagctctcgacgagacagatgcagcgataccctcggattccggcaacgacgcacggattgaaaataattgctcgccggagttgtctctggagttggaaccgccccgaacttcgacgagcaattccgggaattgtggatcgaaactgaggaaacggttccaggatttggaaagggttcgacgagatgttccagccatatatgtattgctaaggtttgaagatattttagttttcgtaataatcctatttttaaaattaaaataattctagaaaaaaagctaaaatcgtttttaatgtctgaaaaatgtgtcgaaggctccaaaaattctagaaaaatttctagacatgatgtggcaaccaatgaacttaaaaaacatatttagaacttttgaaaatgttttaagtaccccaaataaatagatttttaatttcggaatatagaaaatgtttagaaaaatataaaaatctaccaaaaagtcctacaaggcatattaacatgttccaaacacttcttacacttagaaacactatgatgtagcaccaaaaagttagtcttccaaaaagtcctacaaaaaatgtagcacccaagagacacttgcaatacaattgctcttgcagcctacaaccttgctttgctacttgctttccaacccctgaatgtttggtccacggttttccatgccaacatgcactaaatcatgtgtaaataaggacaaagttagtcttctaggacgcattggatatctatgaagtcacacctagccctagcctatcattttgcgggtcgggtcacgtgtagaccatggttcacaatttcatttgtacggctcgaaattttgtttttttttaccaaaatttgatttttatattttttgaatttggaaccgaaataaaaaatgggaccgaattttgtatctcgaaacgcaccgaaatcaggaagttttatgatgattatctatgaaggaatataaatgagtatatagagtttaggatctagtaagtgatgaatttttactatcgtaataactcggtcgatgtagatggttttgatcaaacctggaaaaaaaatgaaacaaaacaccacctatgtccattttcgcgaattgctttgctgtgtgagcggttcacctcgagcgggttggcgtggctcccgatgggacacgccgcgttgctagccgccagtcccgccacgttgttgtctcgtgtctcggcgagtttcttttcttcacacgtcttgagaaatccaagtgaattctcgcaagggatgcatgcagcccgggctggataagtctgggaatatttgaggaacaccatgattggcgacgtggtgcgcatcccattgctcgagacgattgacccactatgacgaatctagctagctcttgacgctgattgggtacggtggaggtggaggtggaggtggaggtggagaagcgctgagagccaccttccatggctttctgctgcctcagctgtaaaatatgtacagtaatttgttaaagatcctgacgaaccgtccacggatgggacgaccaccaaaaaaatagaggtgcatccatcagccacatgtttaggcccattttagaataaagaaaattttactagatcctgcattttcttgtgtttttaaactaatttctatagattttctatatcgttataaaattcatgtgttccctagaagctgttaggcgtggctatatatagccaataagcatgaggcctgcgagcccggcacgaagcccgctgtttgggcccggttctatgtggatccaggtcagcccggaacgaataagcagcccgggttcggacagaaaattaggcatggtgggctagtccggcatggttggtttacctctaagcccgttaaaccctgcactaaaacgtgcccgcttttctgtccgtttagacccgccctgggtcgggctctgacaaaaaatcgagcatgcggacttagacggtccgacccgattttctagccgcgcttggcaggccaggctcaaaacgggccgggcttcactggacccgggtcgggcgacccgtttggccatctctagtcgtggcgcgtgggacatataaatcagtcgtcgtggatcgatatatgccctgcttgtgcattcatattgaataataaaactcaagcaccctttagactggaggacataaaactatagatgatatgatttaatcctattttagagtatagtttaaaatatgtgataagatatgggatcggtggagataggcctacgaagacacgttaattaattgtcttatgtttgtagcacgtacaaagagttcagagcctgcccttatttcagttatttacattaagtggatgatcaatttcactcttttaatataaccaacctgtttaaaatcaaaggtccaaaccatttacttgtttctccggttctcccacacgtcccccagccctataaaaagcaagaggcgggtaggttaggttgctcagacgcggctaggagcagctgctgggcagctatccagcgggccactgagtttaccttactcttactcttacatactaagatcgctaccagagc

SEQ ID NO: 128 - DNA, 3000 bp, Zea mays
ccggccttgacaaaaaggacagcgccgcctgcgccactccgactgtggtgccacttgacagagtgagactgacaggcagtcaggcccggccgaaggcaccataggaagctccgcttcgcccgacccagggctcggactcgggctaagtcccggaagacggcgaactccgctccgcccgacccagggctcggactcgggctaagtcccggaagacggcgaactccgctccgcccgacccagggctcggactcgggctaagtcccggaagacggcgaactccgctccgcccgacccagggctcggactcgggctcagccccagaagacggcgaactccgctccgcccgacccagggctcggactcgggctcagccccagaagacgacgaactccgctccgcccgacccagggctcggactcgggctcagccccagaagacgacgaactctgcttcgcccgaccccagggctcggactcgacctcggccacggaagacagactcgacctcggcttcggaggagcttccacgtcgcctaacctagggcgcagaccaaccacgtcaataggaggcgccatcatcaccctaccccgagctgactcgggccgcagggaacaagaccggcgtcccatctggctcgctccgccagataggcaatgatggcgccccgcatactctgtgacgacggcggctctcagcccccttacggaagcaggaggacgtcagcaaggactcaaccgctccgacagctgtccctccgccaggctccagcactcctccgacagccacgacatcacaccaactgggtgccaaaatctctccggctgccacgacggcatgtacttagggcgctagctctcctccgctagacacgtagcactctgctataccccccattgtacacctggatcctctccttacgcctataaaaggaaggaccagggccctcttagagagggttggccgcgcggggacgaggacgagacaggcgctcgcttgaagccgctcgctccctctcccgcgtggacgcttgtaaccccctactgcaagcgcacccgacctgggcgcgggacgaacacgaaggccgcgggattcccatctctctcacgccggtctccggccgtctcgctctccccccttcgcgctcgccctcgcgctcgacccatctgggctggggcacgcggcgacattcactcgtcggctcagggaccccccggtctcgaaacgccgacaatacccaagccggtattgccacaatcacagttaggcacacaaagatcaggaggcacaggagcatccttactagatacatccggatataacttctaaggacgacctctcttctgccacaacatctcccgatacatgtctttcatctaagaaacgattatatattaacacaactatatgcaaatagcagaaatgattttataaacaccacagatctttgtataaacgtatttcgcaaactatctaataaattgtagtcatcatatgaactacatatcctaggagcaacaatcaaaagtaataatcgaaaaatacaacccaatatacaaaacaaacgaatcagtgagacaccatacattggtatacaaaattttccaactcgaatctagtttttttttaagaagattggaatggagagaaagttaagaaaaaaggtgggtgcaactctcggctagcagaacgactgatttatagaactacctaactcgcgacaagatctatgacaccgacctaggaagccaagtcagcgtcacggcagccctggccgccgacgccacgtcagagctcggcgcctaggccatatgacgccaagctaagagtacaaaattagaaataagtcaccgagtagtctaaatgttattttttgtcgaaaaaagaattaaaaaacaaaaaatcggatttaatcactgcaatccatctcgaacggaacacaagggacattttagctctatccactccgtcatgcgctattgggaaggcgaaaccgaagccgccattttcttgcgcaaccccgtgtagacgtaaacccgggctcgtgcgtgcttacacaccagatttgtatttgtattaatacggagtattacccaaaactagcagagctgaagaaggcacctagcgcgcgctcttcgtttcgtttgatcgcacgcgccaatcctgacgcggtcaaccgcgagtccgcgaggggaggggaggggaggcgaggagaatgacgcgcaccgtgacgaccacattggtgacactgtgttccgtcatcacgatactacaggcgccgcgcgcgtggctcctcgtatcccgaccgacggtcacgtcgcgcgggcgcgtcggtctcgcatcgcactccactttttccactcagttgcgtcacgattttcacgacgccccggcccccgcccgtcgatcccttccctcctcctgcttgggccgcgcccgcggttcgggttccccccttcggccgtccccctatatattaaaccatgcccgtcctgtggaaagcatccgttcggatccgagagtcctgcagagcccatcctgttcctgtccccctcgagcaatcgagctctacagctgcacgctcgcttacgcggagacacagacgctgagacacacgcaggtcatgatgctgctcatggactcggggagccgcggtgactgctccccggtctgcttggacctcagcgtcggcctttcgccgccgtcgccggggagcggcccggaaacgacagctgacgctgagagactcgaccgtcccgccactggctgctgggggccacggacatcgtccctcgctgacgggaaggacgaggtaactgaccgacgaccatttcctcgccgctcggtttccacaatctatcggcgtcgtcgtcgtccctgaaatcctgaaaatctatcggcatcggtggccacaatgctgtgtgatgacaggccaagaccctggaggccaggctcacccaggtcagcgaggagaaccggcgtctcaccgagatcatcgcctac

SEQ ID NO: 129 - DNA, 3000 bp, Zea mays
actttgaactagtgtctccctcttttttttcttttggatccattatccccctgtctttttcttgtttatttcttttcctctttctatggtttccttataaatgaaaaatatcagtcggggaccctctgctgtttcatcaaaaccgatctgccttgtatttgattgttcttttatggcaggaagtagcacagagcatagagaagcttaagatcagacttgcccaagaagattttagtgctctaggtgaaataagaaaagtcgtccttaatcttactgctcctatgcaattggtgagatgtctctatatgtttatatttgttgcaattaagacatagttatgacattaatctttttattgtttcatgtatgccttattttgtgtctcaggttaatgagctgaaggagaggatgctaggctctggaatgccctggcctggtgatgaaggagacaagcgttgggagcaagcatggatggctattaaaaaggtaccctgatctaaaattaatactagcatccataagattcggcacatccttgtgggtcatctgcttagaaacaccaatggctttaactttaagggcatgttttgtgcagtggtgagaactgtctcactaagtcaccaggttgtaagttcaaaggagtgtttgtatctgcgggaaagggcttgcctcggtttgtcccttccaatccatagacccctttcatgtgggagcctttggcactgggtctgccctattttttttgtcttcattcatgggtcatttgatctcatatattgtagatagatctattacaaataagaaacatgcttggaaactgaatgtaagaaaaaaattccaagtatgataattgaatatctccatttcctttttaggtttgggcatcaaaatggaacgaaagagcatattttagcacacgcaaggtgaaacttgatcatgagtacctttcgatggctgttctcgtgcaagaagttgtgaatgcagattatgcttttgtcattcataccacaaacccatcgtctggagattcttctgagatatatgctgaagtggtgaaagggcttggcgagaccctcgtgggagcctatcctggtcgtgctatgagctttgtttgcaaaaaagatgaccttgactctcccaaggtttgttcttagaatattgtcttatggtaggctaatattatgcaatccgcttcagttggaaagttgatgaatttattatattgggtgctgcgttgttcttaaaaatttcaacccaaacacaaagtatgttataaggaatcctgcccccccgccctctaatttaacttaatttttttcttacttataaagtagactgcatatgaacatactggtaaataaatgtagattaattgaggaaaaaataatggtcagtaggtcccccaaccagattgcaaaattgcaactaatgatatggtttaccagatctaatctttaacccatctgtagttacttggttacccaagcaagccaattggtctcttcataaggcaatcaatcatcttccgttccgactccaacggtgaggacctggaaggttatgctggagcaggattatatgataggttagggaaatccctttcttgaatatatatgttaaggttcttattggtttggaatgacagataaattgtttgtttcctcagtgtaccgatggatgaggaggatgaggttgtacttgattatacaactgaccctcttatagtagaccgtggattccgaagctcaatcctctcaagcatagcacgggctggccatgccatcgaggagctatatggttctcctcaggacgtcgagggagtagtgaaggatggaaaaatctatgtagtccagacaagaccacagatgtagtatgtatgcatctattagacagctcaataagcactgttgtacgcttgtatggttgggacatatgggcgttatggcatgtatagttgtatgcctagatgtacaacacgtgtactcgtatatatatatataaatgctgaaacaagcattggtcctgtactgtagtttctacatttcattgtcaccaataattaagtgtactcctatggctgggagtctatgaaaatggacgtgttgacttattgggtaataaataatttatatatatacttgtgcaagaattttctcaatatgttgcaaagtgtaaccagcttctcaggagttatatcggttggagcagtgtgctcgggtacagcttcttatttcaatgtctccagtgggcgtcttacctctatgtttgtgtttttttttaagtgcagaaatagagaaagttcttgcaaatatctactctatgaaaaggacagctatttggaaatatgtgaacagaactatccccagttgctgggaaaaaccaagaagaaagttcctgcaaatatctactctatgaaaaggacagctatttggaaatatctgaacagaactctcccaagttgctgaacaaaaccaaagacagaaggaaccaccacaatccatacagaaatggtagggttcttcggcgcctctgctgcatctgatcactgtcgtttgctgacaacaaatggatcagttcaccatgaactgattagacgacaccatggcagaccaagaagtgcgatcaggtgctgcagcagcacggcaaggggaaggaccagggactattactaccaggtgctgggcatcgcaattcaatccacacctcagcagatcaaggaggcttacaggaaactccagaagcaacaccatccagacatcgccggctacaaggtgcacccatgcctaccatttgctctcctattcttccgctcatccctcctccttccattcatagttggggtgtgcgtgcccaggaaaacagcagctgctggttttatttgggcagcttctaatatcaaatctgttcgattttctgaagctaaaaaacagaatgttttgggatctgaatgtgcagggccacgactacacgctgctgctgaacgaggcgtacaaggttctg

SEQ ID NO: 130 - DNA, 3000 bp, Zea mays
tagatctgatctactatctactgagaggaacggggaaacacacctttattgttgttgctatcttcataccgtcgccctgcagagaagcagcaggcatcgggatccgagccgctgtaggttgtcgcgtttccaaacactccgacgcctaggcgatggggcctctgaggactagggttttggggcgaggtactagcgttagtctttcctgcgaccccttagtcctatatttatagcgtcgtgtgcctgggggctccaccgaggttagcgtgggccctcccaatcaagggcccatttaaagagatagatagtaggtttagcccaatccggtcactgatgaccagctgttgaggacacacccaacaataccagccagacaatagaacgctgacgcgcaccggtccggtgctggccttgtgcggatggatcagtcggccgcgtgagagcttgttcggttacagcaatctagaggggattgaagaggtttaaattctcgtctagtcatttttaactaggaggagattttaatcctctctaatcctcctctagattggtataaccgaacatgcccaacgggatcgccgcagtatctccactccagactgcggcggggctctgtttcgtcagtaggttcaagggtaaaccttgcacagcacagcacttcggattgtgactagacatgacatgtgctcaggccgaggctgctacttgctctaggacaggttccgatccacatctgagaaagcaagcccggccaaaaatgcacttttcagccacgaaaaaagacgagggcattagcaggcgtctgacctactacactgtactctgcagtagcatttgtactagctacggaaaaaagaagaagctgtgaacagaacagatacactgaagaccgcagtatgtttgttgtgtgttgtgtaagcaaagcaaagcaaagcaaagcaaagcaagcagcagattgacagtgacttacacttacacctaaccacccaggcacctcccacaagcgatttgttatgtcctactaactagctaacggatcctccatgccatcggtggattcaggtcccagaccctggcgtatccgagcttgggggcaacatgggttattattaaaggaggatccgtaatgaggtcacccgtgacctcaatcgaaaggtatttttggtgaaccaatccagttgcgcctgattatatatataagccaaccatgggggaccatggtatggtctagaaccgtatgcgtactttatcagtaaactgcccatgatctagcagtggtccaatgtttgtcctagactcctagggggaaaaaagatctgcactttgtgctgtgctgtttcttcttcttgttgttgttgtacgtagcgccgagatttcccagcaccgcttgcgatttagaaacccacagtttgttctttttcgtttaggggatggttgtacactgctgctgcttcttactaatgatacaaaggagaggtgaagttcgcagttgctgagatagacagatgagagagaaggcaacgctagctaccgcgacaaggaggaagatgagcaatctggaaagcacggcatcaagcaagttgtagccttgtagttttaggagtgtccttattgcgactttgtcaccctgaggctatccgcagtcgcgactgcaaacaggaactgtaaatttttacagctctcacaaacgatgcagcggcggactgcaacaggaactgtaaatttttacggctctcaggaacttcacagctagcgcaccttctgcggtggactgaataatctccctcctctttctattggctgctagttgggtgtggaaaggaaagaggtgaaaataaataatagaatatatggtatatggtatagggtagatatttagagtaaatatgaccgcggagtattatgggatagggtagagaatctcgctgaccaggatgaaatattccttttagagtagaaatttagggttctatgagtgcggatagcctgatgacctgagcgctcccatgcggccatgtctgatgaattatggcggcccatccgctgccatcagcaaacgcccacgaatggccaatcgttgcccagcagcagcgggcttcagtattcgtcaaccaaattgtcaggtaacgtggtgcggtagccttatgtccgaaaaatcctagaaacaaaattccattttttcctccaaaattttatataacgagtgaacgtactaaagaggcttcggcttggttatacttcgcgcgaagaggcattttccttccattgtgttatggttagagcagtttgtgtaatttgtctttttttgtcccttgaacttgttcttgtctttgccggtatttttttgcgtcttttagagctagtttgaaaactatatttttttgaggggtttttatttttctaagggaaattagtttatttttcctaaaaaaaataagaattcctcggaaaaatgtagttaggaactccatttttccaatggatttctgtattcctaagggaaaatgaactaaattcctttggaaaaatgaaaattccatgaaaaaaatgaggttttcaaactagcgctaaaaaaatctataagtctattaacggatgaacaaagagactatttacataaagagaacaggatgggcacaacgccttttcccctttggcgcactcgagtgcgtgaaggtgatatttatcgatcgatactttttcgcgctataacctgtgatttttatagtacatgactgcgtattctacgttttgtcacctcccaatgtgtatatataaatatatatctatctatcagcagttccttcggttgctactgctaacatctctagccgtagccgagacattgacttgaacaatctgtttatctacctatctctctctcacgcagtcacgccccgccgccccgccgcctttttatgattaatcagcgagagtccttttgcgccgcgcggatcgcatactagagaggaggttgagcggagtaggcggcggccagca

SEQ ID NO: 131 - DNA, 3000 bp, Zea mays
aggtcgggcgaggatgtgactcctcccgaggccaaggctgaggccgaggcctggggtcgggcgaggcggagaccttctcccgaggccgaggttgaggctgaggtctgaggtcgggtgaggcggagctccctgttgcgtccgaggctgaactcgcgggagatcgtgactcagttctaccctggtggttggcacagtagtcggaacgggatgaatagcgttgttttcctgtcatatcggtcagtaaaggggtgaaatgactgctgtcacttcgaccttgccgactgaggcgcgcgtgtcaggataaggtgtcagacaatccctgcattaaatacgcatgcgatacggtcggttggtaggacgatccagtcgaggtcgctgtatgacaaagtttgcccgagctgggcttcggacgagccgagggtgtgcctactgcttgaggaggccctcgggcgaggcgtgaattcgtctgggactactgtttctgcccgaggccgggctcatgcgaggcagggttgcgtcccgtggtagacgaggccttgacttgaaccgcgctctatcagctgttgatggtttgttctgaagatgttttccagccgtgtttaggaacattggaggtacccctaattacggtacccgacaaaaacaaaccaattttattagccggttaataagaggtttgaaagatggcataagataggtcattgaacagtttaaactagattataaactagttttttttattagctagaacttttttagcggtcaacttattttatttagttaatctaagtagggtctaaaataagttgaaaacacaacttatgtatatagatacgagatacatagaaacacgccttattatagatttattaataaccctaacttgaatatgtacatgtacattgtaacctaaaatacctcggaggcgtcctgctatgctgtgagaaaataaagttttaggactagtttgacaactttatttatttaaatttttatatctttctaaagaaaatcggttttctttctttggaaaaatggaaacctctcgaaaaaataaagtatctaagctagtctggtcatgcaggttccgtataagttgcttaaaggctcgtttgtttttacttgtatgtatcttagatcgaagtgaaaattaaactagattacacaatctgactaacacatgtagattgaaaacgaatacgaagttgttgcgggtttgcccggatggatcaggtcatcaggttgagacacgaagaagcgaagtttgagccgctgttccatttcccatactggcggcagacgcgccgaagagcctgacgtgcgagcctgtgccacactgccccacggcccccacgcccggaagtggctcgatgccaagaggtttttacgcggcgcgcggcgggtcatctcacagtcccatctgcaggagagtccggagcggaggccgggcgggagcgggaccgcgagggggcgaggggcccagggcaacgcacaacgcgccggcggtgaccagtagcgggcagccacgcggcgcaacccgccgaaagagtagggcctcgcgaatcgcgatcgcgaggggaggggcaacagcggcggctggcaataaaagctcgcgtcgaccgcccctgccatgcctccacactcctccctgtctcggcttcgattccgcacttcccagttcccttcccacattcccacacccgcctgccttccttcccgtcgccttcttccccgctcctccgtgtcccactcccgtacgtgatacgccctcgggctcggagaaggaaaagcccgctctggcaccagctcctcgcatcgcatctcccctgccagggaccaggcatccctcgtcccggtacgtcgtgcctcctcacctccctttttccaaactctcgtctgctgctttacttcgccccgcccagccccgctggcgaggttgagtttattggtgctgccgggaccgggagtgtgcttgcgcgttcggttttaccgcaatgggggagatgtccgggccgtgttcgttcttcctggcgatgacgctctgacaggttaagcccgggtcgatgcgctcagtttgaatcctactccttgttttttcttttgttcatttatttagggaagacgatgacgctatcacgctatcgaatcttagactgggacgcgacctgtgcattctagtcgacaatgcagttggtgctcctgctttccttcgttgccagagacaataccattgccatgctagccagatagataagatagctaggccgcaaccagaggagaggggaggcgaaggaaatttgaatcttttcccctattgttcacattgaatggaaaaactaattgtacgatctctaggctgcttaactcgtggtgtcaatctattggacgtggaggatttaaatttcaatgtgtcagtgtgttggtgcatccttgcagacactagccgttctacccctgacgaggaattgaggaccacgttagctttcgttgtgtcttcacgccgactgtggagacctaatctttgtcctttgttccgggaacacgtgagagattcgtgcccgtccgtatatttgttttgatccaatttgttgtttagctcagttcagcaggtcggtcaataatttatgcttcccttctttgaaaggttgaattaaagcattctgttccatcgttggttccatcttttcatttgaaagagaaataaaaaggtaagggctagtttgtaaacttaaattctctataggatttttgagaatttacaggaaagttaagctaatttccccctcaatccccggtaatccggaatttaagtttcaaactagccctaagtaatgcaaattttgctctagttctttcccgtgcagagagccgcatgataatgctttataccgatcagattgacgaccgtgcagagagcagcatgataatgctttataccgatcatgataatgctttataccattccccccctgcaatttgtgcctcaggtctggagcagat

SEQ ID NO: 132 - DNA, 3000 bp, Zea mays
gtcaacacgcagcaggcccctacctggcgcgccaactgtcggcgtttcaacccagggggtctctggaccgacgagtaaattgtcgccgcgtgtcccagcccagatgggtcggcgcgagacggagcacgaaggggggagaaacagcaagaggggaaacccgcggccttcgtgttgccctgcgcccaggtcgggtgcgcttgcagtaggggggttacaagcgtccgcgagggagagtgagagagagactgtccgccagcccgttctcccgcgcggccaaccttctcgtacgagagccctggaccttccttttataggcgtaaggagagggcccaggtgtacaatgggggtgtagcagtgtgctaacgtgtctagcagagaggagctagagccctaagtacatgatgtcgtggcagccggagaggttttggcgccctgttcatgtgatgtcgtggccgtcggaagagtgcttgagccttgtggaagtacaactgtcggggctgtcggatccttgctgacgtctccttgcttccgtaaggggctgagagccgccgtcgtcatggagcacgcggggtgccatcattacttgtttaccggggcgagccagatgggacgccggtcttgtcccctatagcctgagctagctaggggtatggtaatgatggccttccctgcgacgtggcgggtccgagcccgaggtcgggcgaggcggaggctcctccgaggtcgaggtcgagtctgggccctggggccgggcgaggcggagttcatcttccggggtcgaggctgagtccgagccctgggtcgggcgaggcggagaccatcttccgaggccgaggctgagtccgagccctggggtcgggcgaggcggagttcgtcttccggggtcgaggctgagtccgagccctgggtcgggcgaggcggagaccgtcttctgaggccgaggctgagtccgagccctggggtcgggcgaggcggagtccgtctttcggggtcgaggctgagtccgagccctgggtcgggcgaggcggagcttcccatggcgcccgaggctggacttagctgttgtcagcctcactctgtcgagtggcacagcagtcggagcggggcaggcggcgctgttttcctgtcaggttggtcagtggagcggcagagtgactgcggtcacttcggctctgtcgactgaggagcgcgcgtcgggataaggtgtcagtcgatccttgcattaaatgctcctgcgatacggtcggttggcgtggcgatctggccagggttgcttctccgcgaagactgggcctcgggcgagccgaaggtgtgtccgtcgcttgagggggccctcgggcaagatgtgaatcctccggggtcggctgcctttgcccgaggctgggctcgggcaaggcgagatcgcgtcccttgagtggactgagccttgaccttaatcgcacccatcgggcctttgcagctttgtggtgatgggggttaccagctgagattaggagccttgggggtatccctaattatggtccccgacaaatagcatggagaatgccattgctaaggttcatggaatgcttaagacatcttagaagagcattaaaagaactctaatcatgtgatggtggttgagaaggatagcaacaaacggaattgctttatcaagggcaaggaaaatagaaagtgcaaggctaaagatgatatctcaaattcaaatgaaagtctaagtatggccctactcctaaagacaaatacttcgatttggtgtcttagagcaactccaatagttctctaaaaaagagcttgctaaagtcatgtttagcaagttaataaatagctattaagggtaaaaaatagtttggtctccaatagttgctcgtatttagggagtagttaaactttaaatctagctttaggaggcctgccccatcggacctggctaacaacagggttgagagcataggatgttgaggacggaggagaaaaggtcggtcgacacgacatgtgaagaagcggtggtctggaggcacaatctatgaggcattagtggtccgacggtagaggtaaagcttgtgtcacgcgtaagacctagttgcctcactgtgtgtaaaagtggaaaaagagtgtgacggacctggctaccacattgtgtgggaaaaaggcggaaatgagcacgcgtgtgtgaataaattgacgacaaatacgtttagggagttactattgagttaacaatgtggagagcaaatggagttggatagtaagtaactaaatttagtaagtctatttagaaaactattagtgttaagatttagagagttgtttagagaactacaagagttactttcaggcttgtagcacgttttatcttcaacatggctttttcaatatccttattgggatattgagcattatgaccatcatcacttatctaagtctatgttcgccttttatctgtttgaactatattttatatactagcgttttgacactagaaaagtacaccctcatctgctgtcgttgacgtgtacatattctaccacacacacccggcctttcaaagtatctaaaaggatgtatgcttttttgtatgcacaaagtcccctacggtggcagtggcacactttgtttggtactaatccttctcttttagagtgtttggtttaagaaataatctagttcattatcttatccttactttcttttatttgtttgtgaaatgaaataagttgatttatcgttatctcatttcatttagttagttaatactaatacgagaaataaaatcatacaatcaaatttgagtaataaaatcatgatgtaacacctcatcttaaaatattcctcaaatcaaatactctttcgtctgcgagtcgtcttatatataaacaccaacctagcccttatcccactccaccaaaaccacagcaccatcgtcttccttgtctctgccttcccgctagctcggttcttgctgtgctagcctctgttcatccacacccgcgcgcgtca

SEQ ID NO: 133 - DNA, 3000 bp, Zea mays
tgttcgtttgtcttgggccagaaacaaaagccacctggttttaactcctcagcctcaattcttagcccaggatgaacccaggtgaccaactatccggattaattcctatgctgaaagtgggatgccgacccgaaataagtgacagcctaggattcactcaatcttgggctggtttggttcctggcttggcttcaatcctggcctgccgaacagagccttagcagaggaagaaactatacactatttgtatggtgagcctggacgctatcgatggtattaattttggtagttactggtagtggtcacgttaagacctaggtcgctatggcgatcattgctatcagtaaggtcagcatcgttataagtaattctatgttactatagaaatcaaacctttttgtgtctgtaatgccatggccacgaccatgacctcagctgggtgcctcttgcgcgagtgtggcacatttgtcttcttttccaactttacggataataatattcatatagtctaccttatattgcatggctatgattgttttaacttccattacgagtttttttaactttctagcattatatgggtcttaactttacatctctcttgcgtgaaccattatatatgcatatgcccagcagctcccatattttcctacgtacgtagatatacaggtaggtagtacatacttgtaccctgctggtagcttattatgcatgcaaacgaactggtaacgccgtcatagttctaacaaacaacttcctcacatatacgctttgttcccatgcatcatgcatggtatggtccatgcatgcaacgtctctggagtctagaaggccgtggcctcagcgatgacacacaaggggaaaacgagctagttgagtatacgtctggggaagtcgttggaacgcacagcagcaatataatacacccccctctcaaagttcatgttgtatttcccccacaaggaaatgatagaaaaaaaggcgcccgtgccctgtctcgctgccacttgtctccctctctctctccattctttgacgtgctaacgaagaggtggagtatatcaccaccattttgattttggtgacccttacgaaagaaaagagactatagaaaaaaaagcgaaaactgaaaaaaaaaaagaggcacagccgcatgccatgcgtacgaccatttccccggcggactaagcgtctgttcaacacgtgtactgctggtgccgtttaaggttcagagctttctttcagcactctcgcatgctcaccttccaaagagtctaataaatatataaaacaccaaagaaaaagcttctcttgacacacacacacacacacagatatatatatatatatatatatatatatatatcctccggtacagtaaaggtagtcgtttagaatatgattgtgcatactaagaagtgattaattatcatggagttttccctgtttgcccttaataaatagggatatgtgtgcattagcgtcaccaaaacaatcaagtttgattggttgctgcagcacctctcgaggcattctagactgcaggtctcaagctcgattcctcatgagcgcatccggagagtcatcctgcgcgtgactgagcgtgcacaaaagaagtcgtagcgcgtgtgggtctgggatttggacgtcgctgcccctgagtaattatatcggaaaaaaaaagatacgctcatgagtaatcgagcttaagacctgcagtctagaatgcctcgagaggtgtgcagcaaccaatcaagcttgattgttttggtggtgttaatgcacccatatccctatttattaaggcaaacagggaaaactccatgataattaatcactctttggtatgcacagtcatgtcctaaacgactacctttactgcactggagggagtatatttctagatccacctttgcttacctatggcttaatttccgatgctcaaggcgatttgagtttctagccctactaatcaagttagctaaaccgagctacgacagtgatcagtgcagtacgagagcgtgcgtctccggtacccgctggcctggtcctggagacaggagcagcagaaagggagaggttgagctggagcgagggattctgagtttaatcgcgcgcaataatttccgagcagcagaaagggagaggttgagctggagcgagggattctgagtttaatcgcgcgcaataatttccccccacttgccccttcgctcagtcgcctgctgtggcctgtggagtgcgatgcgtcgtggttagggctggacaaaatactcgtggctcgtgagctcgctcgacttgtggtcagctcggctcagctcgactcagctcgtttcaattttatcacgagctgagctaacatctcagctcggttcgttaacgagccagctcgacacgagctcgagccagctcgttagctcgaatgagctagcatttatctgtaaaacaaagcatatacttgtattagattaattaataagtgacgaactatgttagtttagggtttaaatgatgtgatatataaaattatgagtattgctagtcttttctagttttaaattagtataaaattaactagcaattgattatattgttgtatatatacatgtatactacattttgttgtggctcgcgagctaaacgagccagctagagctcgcaaacgagccgagccgagctggttctctagctcggttccttaacgagtcgagccgagccagctcgtttctttaacgagccagctcgagctcggtcgagccgagccgagttcgctcgatatccacccctagtcgtggtggtggcagatttttggggagagactaaaggctcacggccaatctataaatagctgccacctccctcgcttttccctccaccccagtccccacctcttctcttcctcctcgtccgccgttgctgtctgtctgcctcctcctccgccgcctagctgcttacctgcttccaccgcaacaagcagagtgcgagcaaagacagaaaacc

SEQ ID NO: 134 - DNA, 3000 bp, Zea mays
ctgaagatccgtcatgagatcctaggaggactcatatctttgaattataaatatgcaacatataaatctcataccgaataatacattcctgacgaatgaacactctcctatgtagagagaatatctcctagttgagattatagtttctaaatggaacctttccggaagaaacaaagtctgtgttgaacaccaaagtttgacaacccatataatgggataaagacccatacagacccgaaaaggaataagatgaagtaccaaaggacttgtagttcaccgaataagcacatgtgcatcccacgagttttactcatggtattttccactagatgtggaattacggtatcctctaaagccctgatggcagaaacctataaggtttaggtgttactagcaaaatatccccattgtgccagaatgacagactataacgatgtatctgatcgatgaaaaatccctgatggattacgatcttagatggacttttgttacaccatcatagatgttgcaatggatgaacgcctcgagcgatgtgtcatatttagaatatgtactattgcaactaaattatcccctaagtcctattgaaggacatgttatttgctttgcacaactatgtataaattgtggtgtaagatagaaaatgatagcaccccaacctcatccattctcgttattccagatgaacaatgagacatatatcttgaagaatatgcttgagttatgagggataacgactttgacagatgtcatcgttagggggagtgaatgtttatattgatcacaatcgtgagacaataaatgtcatattctatgccctgaaggcgtgagcttgataatcaatatgcgaacctttatgaaactttctatcaaatatatagatccagtcgatcgaacaccatcagtcaaagtggtttatttatattgatacgtgcacttacctcgtatatcctagaagtgagtagaggtaaagttcctgaaatagtccttgcaaggatatgcaatccgtttgctaaatctttatgtgcatatacttccagaagaatatgttttgccttattgatacgattttgcaaggatcagggggagcacatttctaaagttagcccttgtagaagattcgatagaatctagatcccacaagatcgaaatctgtcacgatgacaattgttgtactctttttcccttggtgagttttcttgaagtttctcacatgaggtttttaacgagacaacaaagtgcaaatgcaatttgtatcaccatgcactctttctccatattttttcccactgggttttttcggagttttaacgaggcatgtgttggtcgcgttattcgcccaagggggagtgttaagtaaccctagttagggttatgtgggtaaatacctgctttgcccctgaggggtctcacatctctatataaggaacttgtacaccctctcataatatagagaagagaaagaggccagagacccaaccctatatcttgtgtcccgtgtgtttcttctgtcgtgcttatgggaagggagatgggtcttctacagcttcttgcgtctctactgctgacgggggaaatggagtgaatctggtgatccgtggtgacgtagttctcaacactaagggcatgtacagtggtgtttaatgtggaggctcttaaggtgttttagggggttatttgcaaaaaaatcttagagccgtctctccgtgaagagacgcctctggctcgtaaaccaagtaacaacagacgcctcacttcccactgtacgaatttgtcgtctgttctatcgatctgatgctatacaaatacatttaattctgtatttattaatagactaggtttatagacactccattgtacaatagaatctcttagttgtctcctgtgcttggagaaccgttttggtgtctctccactgtacatgccctaaggagagagaaggcaccttgtgccgtcctgggtcctccccgacggtgcaagtggaagggtctcaagcccagccctcaagggtagcacgagtaacgaggctcaatttaacaaatgggccggaggacgagctgtcagtctgcgtgcgctaggcctagcactctagccggcccatccggccgcccgaggcaatcatttagggggtgtttggttacaccccgctaaaatttagcccctgtcccatcgaatgtttgaacctccgttccgggtattaaatgtagtcggattataaaactaatttgtcagccgaagattaaaagacgagacgaatctagtccagttggttgggtctatatttcatacttctatttaaaagtcaaacgtttgatgtgacccgagctaaactttagcagaagcaaccaaacacccccttattcatttccaccgttgctctatcgactaataaatccacatgctgacatgcaaaaagatctcaagatattttacgacccggtgggcccagacgccgtattccaacgcttttgccccacgctcgcacccgcccgcggacggcgcaccgccgcctgagcagctattgcgatggatcctggtcagcggataagccacccgcttccgatccgattccacagctcgaccaactctccgcctcccgtcaccacctcgcggctcgcgctctccgatcccgcgcatattctccaccccgtcctctgctccgccccatcagtacatcaccacgcactactaggacgccgcgccgcagccccaccatctccgagaccgagttctgatcgccgccggaaccggtacacggaaagccgtaaaccaatggcgctcctcgcgccgagcccgcgcgcgctctgcgtgcgggaggccgcggcggcgtcgccgcacccgcactcgttggcgaccgccgcctgctcgaccgttggcggcggggtggctgggcgggcgctgtggctgtggaacggcggcgggacggggaggaggaggagggagcgccgggagaggttccgggcggaggcatacttctgggacgtgtccaagccggtggag

SEQ ID NO: 135 - DNA, 3000 bp, Zea mays
gcccgtacgtgccctagccaatcactatgaatctaagatattcttggtgggactaatggcagagccactagtcagacaccttatgagattgcatgctaggtggcgaagtgtaaagattatattaaaaaaggaacaatatattttatagataaataattttgctatataataaatattactcgggctcctaaaagattctggctctagtattggatgggacggtgatgggacctaggacgatggtgtcctctaaaatgttctctaaatatagaggacaatcatctattctctctataaacataatctctcctctggtctatttatttttatttctatacttcagataactaactaagtgaactgaaaatatgtgtataacacattatttgagggtatgataaatgtgtacgcgcataaaattagaacaaaatatgtattaaatgggagtatttcatgtatatatataaatgttgagatatagatgatatgatgttcgacatagataaaatataaaaaagaggatcttttagaggattctataaaaaaatatgatgtggttgttagagaccgtccgagcgattatcatcagcactagagtattatattattattattgactcgagaagcccaagaagaaagaagggacaaataccaaaccaccaacactttgcaatggttagccttctttgctttcacgatcccgggctgataaagtctgtttgcaaaaacaatcctccatgccctatttggaaggcagagctgctcagcttattgggggaccctccaccagccaccatgcaggggcttggcatgcatgatcatgacgtatcccattcccatcccatatccgtctgatccatctcatctcaccaccgcgtagctagtacagtaggctccaaggggacaagatattttcgaagagagcacaccctacatacagtacatcctagctgcgcgcgttcgtttgtttaatttaaaccaaccaggccagggtagtccccacgagattgagaagcaaaagagagaggggccccctactacctgacccgggcccaccgcccattttctttgatgaggttttgagggggccacgaaaacaaataaaaaaacccatgccatatctggtgctgggcccttgcgtgatccagtcgatttgatccgtccttctccttccgcccggctgcaggtcgcgcgcgcagctagtccacactgcgcacgccgcacagtggcgcacagtgcactgcgcacggcggctagctccaagcctcgcgcatatgtaagcatgcacgcgtcttgtctccgccaaacaccgccgccgcctttagctagctctagggcacggcggtggtggtggtggcgttccaggcagcaggccggccacggccctgctcgtccctctgggtgatggatcaatccctgggctctggcggctgccctgtacgtgccaccatgggacttgggacgtcgcaattgtactgtactgtactgctctcagtgctcgcaatcagatcgatgagcgctgatagtcgtcgtcgatgacatactatactaacaagaccatatatcgcatgactacgtgcgcggcgcgagatgtagcaatcaagcaggacaagtgtccagccagcacgcgagagcgatcagactaggtatatagattaggcagatgcgtacgtggagagagcgcggcgccggcacacgcgcgctgtcactgccctcgagaataccagatggagtagatcctgccgcggtgcgcgatccctgtcctgaggagctcttcggcaggcaggcaccagctagattaggcagtcaccagcatctttatttgtccaaaaggcaatcaccagctagattaaggcagtcacactggccaggatatgtcacgcatgcataggcgcgcacagtctctcagcacctaaaaaatctcatgaacatggcgtcatggtgactccacagtccacacgcgaggccggacatgaggaaggctcacgagctcgccacttgtcgcccgccggacccggccagggcgccccccgcctatagtatctatcaacacgttccggccggatcggagaggccacagacgacggggcggctcactagctattactccctccgccctaggagtatatgatattatgataagtacgtgccgttcgccttcgggacatactcatattaaatattaaactgtggccatctattatatatccaatatcttattatatgtactatagatattattttagattgatgattataatttaatatatgtactttatgtatgtgtaccaatgttctacgtgcatctgatctgatgtgttctctagactctagtgtttgcttcagtcttggttggatctaggagttaaagtaaaaaaacggactagattttagctatttcttataaactaaaattgattaaaaatatctttttattactttattcacttttatcttcttctgcttggatgtttagcatctaaagcgactaaacttcagtcacttttactttagctcctgtgattcaaacagactcttgattcttgtgcggctagtttattagtcatgccccgctcctgtcacgcatgtagggtgataatgaaatctgtatcagatcatattagaattagactctatttctctttattttaaattaaactaaaattaattaagagttcagaaaaactataatatatagaacatttgaatcgtgattcattatcgccctacagacacgatcgacaacggtgtggccgtataagccccatgattcggaataccccggcccctccgccatcaactccgcccccggctcccttttgagagaattgacacccatccatccagctcggagcctgggctagctcgcacgggggcttgcctgctgcgtgcggagcggagcggacggccggcgctgcaagggaaggcccgatcgtgtttcgtttcctaccctacctaccatcgtccggttctctccaagccccccctccggcgctgacg

SEQ ID NO: 136 - DNA, 1199 bp, Zea mays
ctagtttggaaacctcaattttctaaggaatttctatttttccatgagaaaatgaactaatttttcttaggccccgtttgtttcgttggaattgaattccattttaataattataatttagacaaaactaattaagttcatatatttatatatgtaatatatttatatattattctaaatcatatgagagagatagttatatactaaatttatgttatagcggagcaagtagaagagtgtgatataagttgtacatcggaaacatagcatgtaaatcaatagaatcaattttcatctctcaccccatgaatttgaggtaggcttatatgataactttggaaagtggtggaatgtcacattctaaaaaaaataacatattccactagtaagattccaattcctcaaaatgaaagaaaacaaacaagaccttaggaaaataaaaaatccctcggaaaattatggttcccaaactagccctaagatgtcattttctaacagtgaaacatgtgcaatatcatcaatgaaggactctgtagtaaaaaaaatttgttgttgtcttgtttcccaaagtgacatttatgcctaaaatatcgatgagtaaaccaaacagtttttcatattacatataaaccatcaggctattttgctattttgtcactctcaattttggctgcatgttattatgtcatcccgtgtctatgactggtgggaccgtctgtgtctatgatttgtgggtccgatgacatattggcgaagcccacaaatgataatggcaaaattgccaatggctctaaaccatcgcctgacagcaaaccaagcagctctacgccaccgcggagaaaatactgtttccccactatccccagtgcgagcgagcctgaggactcccaggcacccaggccaggtctgacggtcagtgacagcatggccccagaggtaagaggaacggcgacgtgagcaagtgcggccgcaactaatccaatcccaaacagttgggcctcggggcctgctgggttaggcggcagggtacgacgacccacccggtgagtttgacccctcgtcggttcgtcggtggccaaccgagcagccgagcaggagcgctagcatgcggcgccgtatatatacaggcgcccacgcgcggtggcggagaggcggtatgagccgaagaaggacgggtccggggggtcgcggaaggagca

SEQ ID NO: 137 - DNA, 3000 bp, Zea mays
ctgcattcaattgacaaaatgagacgtaacttcctgtggaaagggaacaatccagaggcttgctccgggggtcactgccttatcaactggcccacaacttgcctcccaaagagcaaggggggtcttggaattctggatcttgatcgttttgcgagggggttaagactaagatggctttggctacgatggaagagcaaagacagggcgtggactgccatgaagcttccttgtgacagtactgatgaagatctcttcaatgcatccacaatggtgacggttggcaatggcaagatagctgagttctggaaatctagctggatccatggtcaagcccctaagagcattgcaccttcactcttcaggaagacaaagaggaagaatatcacggttgaaaaagctctcactaacaacaattggatacgattatgcttcccatgctcgggggaggttgagcttagagagttcgtctctctatggcaggccataggtaacatgcaagaactcaatggtttggaggacaccattacttggaaatggtcggcagatgggcagtacagtgcaagcagtgcttacaacatccaattctcatccaattatagtacaatgaatctctgccctatttggaaggctaaggtggaaccgaggtgccgtttctttgcctggacattactacataagagaatcctaacggccgataaccttcttaaaaggggttggccttgcaacccattatgctgtctctgtaactcggccccagaaacaattctgcacttatgcaaggactgccccttcagtagagaggtgtggatcaaagtgttgtcctgggccaaccttcctttcttgaatgggtttcccagcgacacatctttgtatgattggtggacgggtctgcgtagcctttgcaacagacagtcaagaagatgcttcgacggcctgctaattcatttttggtggaatttatggctggaaagaaataacagaattttccaaagtcagcatagaagcgttaatcaagtggcccttgcagtcatcggatattgctagtagttgaggtcttgttgatctggtctagtgggtttttgttcttctctttttattttttctttcttatcctctcccctccggttctttggttttgtatcttccatttctttgctctctaatctaatatatttcggagcggcaagtcttttgccccttcctttcaaaaaaaaatttatacaaagccatatagaccacagaacattagctccacccatgaaaatgagcttcttaacactgggtttagctcccttagtccactgcccaaaatagtgtgtgcagcattttgtggagccataatttcagtgcaaatttcaactaatctccaaaggaatctagcaaagaaacatttgaagaagagatgatcaatgctttcattatagctacactaacaacattttaaactacccttccacttctttttaactacattatctttggtgagtgtaactccttcatggatataccaaagaaacaccttcatcttccgggtcacttttgttttccgtattgatacatgtttaggtgcaatattaagattacacaacttatcatacatggagcccacagaaaatttgtcatttttaaggaagccaaaaaaatccctatcactggtaagttgtataggttgtactcttagcaaaaagatgttgcaatttagcctcaattcttcgcactattccctcctgaaaataatttcggtggatcaaaaccaactacctcagccatagatgcttgctttctaaaggctatgttatatagacatagataatgattttaaggcatttgtaccgagccatatggcatccccaaacctaactagctagctccccatcttggagtgcaaaacgaccaaactgtacaaactggcttcattgaaaagcctaaataaccatttactaaggaggcatgtattatgtagtcctaagaccaactccagcaacactccccatcccactccgcatccgcattttgcacggtctgaggcactattgcgctctccagcaggctccgcatccctctccgcaaaatagacgccgtgtccctgcactccccatttccacgctttctctctcctctccgcagctctctgcgtgcgcgcgcggctgctcgcgggccccaggtgtcatagactgcatgcggagtgggatggggagtgttgctggaaacggagacggatacggagaggagagagaatctgttggccgcgcgttttagggatacggagagggagtctgctggagttggtctaagtcctttatccccagactgccctactcaactggtctatacataatactccatcttgctagtctatattttttttccttctgttgtactccttgcctaaagaatattgatctaaagtttcaagccctctttaggaatttcaaagcaagaaaccatataaaccaccaaatcactcagcacaaaatttactagtgtcaaccttcctccatagattaagtatttggctttccaagaatttcgttttctttcaaacttttcttccactattgtccgatccttgttgtgtagtccagtacgatgcatgggaaatgaattttgctggcacagcagcaggtccgcctgatatctgatctgagctgcttatttatgttactgtatatgcctgcttttttttcttacattatcactgatgatttctgtgtctggctgtctgcgttgcatagtagggttcacctgtcagcgaaaagctttacaagccaaggcccaatagctaggaggcccagctatggaagcctaaacacagcttcccaggccaggcctccctcacaaaccgccccaatccccaaagagtagacgcaacggcacaacgcaagcgcgcgctctgcaactaaccaagaagaggggagaggcaaagcgcagagcgaagccaagaagatggccgcggctgccgccgtcccggacggcgtctcctcctgcgggagcaccaac

SEQ ID NO: 138 - DNA, 3000 bp, Zea mays
gtcgaggtcgagtctgtcttccgtggccgaggtcgagtccgagcccctgggtcgggcgaggcggaggccgtcggctgaggccagggcggagtccgagccctggggtcgggcgaagcggagttcgtcgtcttctggggctgagcccgagtccgagccctgggtcgggcggagcggagttcgccgtcttccgggacttagcccgagtccgagccctgggtcgggcggagcggatttcgccgtcttccgggacttagcccgagtccgagccctgggtcgggcggagcggagtttgccgtcttccgggacttagcccgagtccgagccctgggttgggcggagtggagttcgccgtcttccgggacttagcccgagcccgagccctgggtcgggcggagcggagtttgccgtcttccgggacttagcccgagtccgagccctgggttgggcggagcggagttcgccgtcttccgggacttagcccgagtccgagccctgggtcgggcggagcggagcttcctatgatgccttcggcagggcctgactgcctgtcagtttcactctgtcaagtggcaccgcagtcggagtggcgcaggcggcgctgtccttctgtcaggtgggtcagtggagcggcgaagtgacggctgtcacttcggctctgccggctggggggcgtgcgtcaggataaaggtgtcaggacacctttgcattaaatgcccctgcgattcggtcggttggggcggcgatttggtcagggttgcttcttagcgaaggcagggcatcgggcgagccggaaatacgttcgccgttggaggggagcctcgggcgagacggaaatcctccggggttggctgcccttgtccgaggccaggcccgggcgaggcgtgatcgagtcgctcgaatggactgattcctgacttaatcgcacccatcaggcctttgcagctttatgctgatgggggttaccagctgagaattaggagccttgagggtacccctaattatggtccccgacacgtagcactctgctacaccccccattgtacacctggatcctctccttacgcctacaaaaggaaggaccagggccctcttacagagggttggccgcgcggggacgaggacgggacaggcgctcgcgtgaggccgctcgctccctctcccgcgtggacgcttgtaatcccctactgcaagcgcacccgacctgggcgcgggacgaacacgaaggccgcgggatttccacctctctcacgtctgtctccggccacctttctcccccttcgcgctcggcctcgcgccgatccatctggactggggcacgcgacgacatttcactcgtcggcccagggaccaccggtcttaaaacgccgatactagtattatatattcccgttgcaacgcatgggtattcagctagttattgattaacgcgcggagctgggaagaaaaaggaaagaagagaggaaagcacgctgctgagcaggcgttggacgaatcggtgcgtgcacggacgggcctcaactcaccatatctatcgtgcgggctagccgaacagaagagaagggaacgaaggccccaccacgcgcgcgggccaagagccgaaaaccatggaggagaggacacgcgggtggccaggccacgtggggcctcgcctcgttccaaacgtttggttggccacccttgtccggcaggcagcagctggacaacgtgcgggagggagggagggagggagggaggagtcggccaaggccaaatccagaagccgcccacggtattcgactcccgcgccccgcccacagaggaaggcggcggaaaccggggccgtcgctgtacggtttccgcaaaaccgggagcctagcctagtccccggcctcctccaatctcgctttgcgctctggctccgatacttttggtgggcggcgcgcccacgggcaggaaggagaggaggtggacctggaccggatccggatgtggatgtggatgtggatgccacgcgcttcgattcttctcccgcccgccgcccgccgcgccagacattcagcttcctgctccgtgggctccgcctgttttttttccccttgtctttcttactcctgctacgtcatccccatgcaagagacttgtgctgatgaggagtcgattgtctcaggctcatccccatttcaagagactgtactgtactgtactgggtacggaggagtcgattgttccagagtgactcgagaattgttactgacgattgcctacggatcgccggagcccatctttggggtgtttggtcacaccccgctaaaatttagcccctatccaaatcgaatgtttaaacctccgttccgggtattaaatgtagtcggattataaaactaatttgtcagccgaagattaaaagacgagacgaatctagtccagttggttaggtctatatttcatactcttatgtaaaagttaaacgtttgatgtgacccgagctaaactttagcaggagcaaccaaacacccccttgatcttgctacatgaagaagtaaaaagtatagtactttactacaagcccggaaataaaaactctcctgccgcctgacagtttggtcgctagaactagaatccatgtgaacctcggacgcggcttcttgtaaactggagcctggacagagagagaaagagaaccggcccccggtaagcacgcggagggcccacgatgacaatccaaatcccgtcccgcggcgccgaatccgctttagtttccgaaaccacaggcgcccaagccagcacactggccactgctcgctcctccaatcactctccgcgcggcgctgcgccagtgcctgcctgtgcgcttagtgccttagtataaaaaacagccccgcgtctacccctccgccgccgctccatcagcaccgttctttcaaccaaccacctcgactcgaccacccaccacgtcctcgcctcccaagttccattccatccaaccgagagctcatctcatcaccagtccgacgatcggag

SEQ ID NO: 139 - DNA, 3000 bp, Zea mays
gatttgtgcatagggagtttcattatgagacaatggcatctttctctgcattcgaaaattctcttataacgaaaaagataaagcctagttctcattgcttacagctcagcaatccaattcgctatgtcttgatttgtagtttttccttttctttcttttctgtcactttcacccatttaattctgtatcagataaccatgtggccatctgccagtatgcttttgcgttaagattaaacaacattgtggacatgagtagagactgctatttttagtatacgtggacaatggtgtgtctatcagtagcccgttgttgatcaaagtgaggaaaaccccttggggcccaagtgaagtggtatatcaattcacaatgagtttttgccaaaagtaagatagctgaggttatttgctgagcttatatgctgagcagaagtggggtgaattgtatttgcttgtcaaccatatcatatttgtttaaagacatttgtttttctttgcatgaactgaattaatgtttttttactgtcttgcattgcattgggccggggtgcggcgattacaatgaaaggtggtacaaacaaaggagcgtcaggggttgagggggaggggtaagagtggttctttttcaaggaattacatgagctagggaattcatattcgagggctaaggacagtacaccattggtcggcaaagcagcgtctgttagggggcaaacggtgtgcccagaggcgagcgtctgattggtagtggtggtgatcttttttttctttttgcaaagaaaagatttcttatttgttagattaacttagttccaaatgttgaagtttataagtgcattgtccatttcttcctgataacttaagcttttgagttgaactcgttgttgtgtgcaacttaacaagataccaaaaccggaggtcttaagttcgaaggcaactcaagtcctctgccccctttattttcaagtgtgcgtctctttggctggcctgttggaggcaacctaagtcctccgaacccttaagtcctttgccccccttattttgagtaggggtgttaaagtgtatcgtccacctctttctggcagcttaagcttgcgggttgaatcagtcggtgcacgcaacttaacaacaaagatagtatcttatttcactagtgctaatttttctttgtacctacacatcatgttgtcatgtactccctctcttccaatccaaattataagacgctgctatgtcctctggaaaaaaccattactttttactatattatctagatatagtgtatatctagatgcatatcaaattctatgtatctagaaatgacaaaacaatttataatttataatggagggagtagatgcttatgctgttggtaagctgttgaacactttatgctcctttctctctccttgcatttagaatattcacttggtgctgcagtgtgccccttattcttacttgttccttcttatctagaaaattagctagtccgtttctgatccattcattggagtttggctgatacctactttcctcgttttattagaaatatttctctaacaattaattatgggacttgtttttaatatttgggatagtatatggttcaaaattttaattattgacagttaattttggctatatgcaagggccctctaaatccatggaaaaaaggttttgagttgaaaaggtgtgcttacttaaagtaaatgatatgctgaataaatgatatggacgggccatgatattgttgtagattgctggacagaaatggttatagcgctgagttgagtgatggttgcttggaaggattctatggtctttctcaataattgatagtaaaagaaggcgaagttagagtcgaatatcaggaacaggaagagccttttttttagttgcaggaatgacagggtccatctcaacacctccaacacttgcttatttccatcggaatctaatagttggtgctaatttaggttttgcttttctttccatatatatattttgtatgattcttattagattttctacatggatgcagcccagcctccacaattgctcgacctagtgcaataagttgtattgttggtatagaccagattttgtttcttttagtttaagcacagatttgtttatgtttttgaacgaggtaactaaatgggttatgtattgtaccttcaaaattagaaaacatagacagaatctgtcattcaacagttaactgtatcaactcaaagtgtgccatgtaaacacagaatattttactaatcacaccttgaatgcaaggcagaactcctgatctttttcttcaagaaaaaaaataccaatcaccaacatttactctgttttggatggtaccaacctcctcaaattccatactagtgtgttgcagccttatatttggatgtgtttctgctaagacatattttgagaacacctacaacaacagctagtgcatgccatgtttcctaagcgcaataatacttagaagtgcacacatccctgcatcccatgtctcaaaagatgttgccaaggcaggctaagatacagggcaaagaaagggggattcaaactccccataattcttttccctttaatggctttctcttcttttcttttcttttcttttaactcccctcctctttctagttttacgtgattcccttgttcctcgcgggccaaagcgcgctaagaatcaaaggcacaaagatagctcaccctcggtttcagcatcccctccaaacatcactataaatacccctgcacacacgcaccttgctgcatcaccaccatctcacttcatataccactccctaggaggacccagcaacacacacagccgagctttgcttaggtaatttagctttgtgttagcgcgtaacctacatacatatcttcttggattatgcttttgttctagctcttcgatggtatcttctttaatgtgggtgtcctttttttttttgagtcgttttgacggtgtgtaactactgcaggcaag

SEQ ID NO: 140 - DNA, 3000 bp, Zea mays
agcatggtggaagtcatcgttccactcatcttcgttgaatgagctctcttgacgaagctctctgtgttgaggccttcggtcctagtcatcttgagtaagatgacacattttttcagcagcttcgtcaatcttcttctgaagatcggccagtcaggccatcttctccttcttcctttgcacttgctgatggatgatctctaagtccctgatttcttgatcgatttgctcctcttgtagagttgggctggtacttcctcttttggtttctggcctctcgcagggagagggcatcttgatttgtgtccagtggttgcagagcagcccttggcaccgttgtcctcttcggcggcatgtcgaagatagatgatcttccgaaggatgtggaagtgagttcaccggaggtgggcgccaatgttggtcacttgttctcagatgttatagattaagaacaaggcaacacaattgtcaatggttaaagacattcgtccttcaaagcattatttcctctcggataaaatgatctttagacgaaggtcatgaaggacacaccttcataattttatcatatatacatgaacattaataagaaaatgatgaaatacagatgaatgaagatagtaattgttatatatcaatgattcatttgttattatcttcgtcaaacatgaataaacattaacaatattcatattacaatgataccttcggcttggcagaagataacgatgtgagaaaggcgcgagagtgaatgcaatgtcgcgtgaacagtaaggtgttactgttcccctatttataggcacgggacacaacctggacaaaattacattcatgtccctgatatttactcttaatcataatgtgattaatcaaggactaagtaagtgtttcccctttaggtcggtttcgtccttgatcttcatcatcatactaagccgaagctcctccagccatagcttcagcgtccatccatatcaccttcaggttgtatcttcatatcgcgcatgcctttgccatgagggaaaaccttcatcccgaagctgaagtctcctataatagtccatatcatattgaaaacatatgattagtcacgttttttaggaccttcggaagatgaaggcccccaacaaatttaatttcatgttgctttcaatatgaatatgaatatatatatatatttgtttctgtgtgtaaatatatgtaaaattcaaatttgaaaaagggcgaaaaaactaccactggcagcctaataaagaaaaccgtaagtagaaatgtcgttttcactggtggttagttaagaaaacttctagtgaaaagtttatttccactagcaacctaataaataaaaccgctagtggaaagtttattttcactggtggttgtattaagaaaaccgcccgtgaaaatatcatttccactgggggttccaaaataactgaagtggaaatgtcgattttcactggcacctagcactggcggcactgaaaaataccagtgaaaatatctttagaactgttattatagagcttctgtgtactagtgttgttgacatctgcagttctccttacagaactaacaaggaggctacttcttgaatctcaggaccctacatgtttccctcatgtctcttgaccattgaatagctccctcatgacatcatcatcagctgaggaaggactcatgaagcaacctagataaacttttcggtggtcatcctcgaaactaaaggcaccaatttaaaaaaaccctttctataaatatctccgtatgttcacaagagctggcgccaagtgattgctgaatgcttatattaagcatggagacaatagaacagaataccgattcaattattcaactataccgagtccctactatgacacctgcaaggaccacggcgcaccaaaatttggcccagaaatattagattcataatcacattgccttcattgtagcaaacattgagattcattgccttgcagcttgccaactagacacatcaataactattactcaaatgtcatgaaccatttttttattgaaaccgacaccatctcctatacatatttttttagatttacccagggcaattatatatttataatatccataaccctaaccttaccaacaggccatcagttttaatccggacatctagatagcaaattagcgaaatatgctctagtctaagcaggagctttaagcaagaagtttatataggtaaacataggcgggcggtattctacatggatgtaatgaaacttcaagaatgtatttgctcattcgcaactttgttatcttgtttccgtcatattgcaaatgctggaaaagagaggagaaaattaagtaaagctagcatcaattagtttctgcaaacccccccccccccccacccacacacccacccacccacaaatggacgtcatttgatgatgtaacccttatcaaacaacagatgatagagttaattgaacctatataacaagggaaaatatgttgttatcacatttaatatttcactggaaaaactggatccagtgttttgtaacatttgttatgaacagatcttctataggataatagtcccatgggggcaatatacctgtacatgagtgcgtaaaaagggctttactgatgtaaacatgaaaaagtataatcctaataccattaagtcaaaattaggccactcctgtacacagaaacaatcacgtaccaagccagtaaagatggctccaccatgtgagaaacaatggtcctttgcattgaatctcccaactaccgatatgaacatctcaccaaagaagcgcatgggcttgtcccttgccagcttgccatttgtgatagctgagaccacgatgcaaaccctcacaaatcctaccacacacgtgccctataaatactcgagcactgacacaaaccatcaccacagacaactcagatcgtttctaatcattccatctcaaagacaggagttcgtctccttgttaggcaaagaccggtagcaaa

SEQ ID NO: 141 - DNA, 710 bp, Zea mays
actcccgaagatgttaggccaatgaaaagcgagccaaacaaacagaaaagttttgccttcccgagtctttgctaaaatatgttgggtttacctgaaataaaatgacgaagagtgttactgttctcacatcagttgaagtggaagaaatagaaagggaatggagaggcatagaagattctaattttagcttgggcatgtacttttataacttagtttttaaccaatcttgcccaacaaatgtgttcaaacaaattcagctgtacatgtagaaaatgtcaattagttcttgacaaaaaaaaattaaaatgtgtcttyaatttgcgtgccaatcaaaccagatacaagtgtagaaccaagcagcagaaaactgtgtaccataatgaaaggatgaggctgacgcaaatgtaaatagactgagagaagactaatagagtggacccaaagagtaccaataggctaagaagaaaaaatgagcatcgaattcaatcatacacagcaagacggcaacgtctagcaagataaaattcatagctttgtctcttgccaaatagtcatactaatgcytacacccatcagacatagcttatggctccagtgctcccttgctgtcctataagtacatgaagctagcgcatatcatcttcacaactcatcaaaaaactgaagcactagttcagtgcaccaaaagttcatatcatagaattacacca

SEQ ID NO: 142 - DNA, 3000 bp, Zea mays
gacatcagctggtactggagtggcccaataagtccctccaggaactgttcttgcttcctctcatgctcatcaacctcctctggagcataccttgacagctgaatgaatttatctatgtattcattcaatgttatattcccttgcttgagggagaggaattccttcttcttgatcttcatcagcctagtaggaatatgataattcctgaaattagcggaaaactctacctaggtgatggcagcggtgtgagcatcacaataagaatctcaccagtctacagcggggccagtgaggcgacccgatgcatagagaactttctccctatcggtgcactgagcgatattaagcattttctccactgtcttcagcaaatcatctgcctgtagtggatctggagagctggagaaggtgggtggcttatgaatcatgaactcccggtgcttatccctaggtggtggttctggtggtggaggtggtggctgctgtcggtcttggcggagctgagcttgcatctccgccatagtattagccatctgctgcggctgctgcatctgagcggcaaccacgacataggtcccagcaggcggaggattcagaggaggattcatctccggttgtgaattgacaactgccctccttcgacaaatacgagctggtagatcgataacgcctccctttctagtattgaccatctgggttagaaacacatggtaagatagatttgcagataagacggataagtacgatacacccaacttttaggtcatgatctctttggtcataatagctcagtagattagagtgtcacctacttaatactaatacattaccctatggtggtacatgctaggatgccctattatactatttcactcattcaaagaagcaaattaagcaattatcatcagaacaaacacttaaatattgataaaagaaaatatattgtgtcttaggtctcctatctctttagggattcgtaaatataggatttcaaggtgtgaaatcctttctgcctttttggagtagaaacgataagagtagttagagtagaacaaccaaatgtgagacaagatcaagaaaagtatggaaagaatcagagtaaaagtaagtaggtaaaggttttgtttagttctatctagatttcgtcctacagtcaacattcatctgataccacttctgtcaaacctggatttaaggaccaaacacgggtgcatctcatatgtgcgccaaagaagaacaacacatataatgaccaagtgtatagagataaatgtcacaaactttattacatagaggaaatgtcttacaaaaataaatgataataaataaatcgaactaatattatttccttggtgccattaagctgtctgagagacgccacctagacctcgtcgaactcctcatagtagtcctcctccggagccacctgctcttcacatgtgtgtgtgtgaggttatcagaagggtgagctcacaaaagttcatcgctcaacaagtgtggagaataatgtgcatgagttcacttacggtgtgggctcacgtgaagtgtaagacttattaacaaataatggttaaagctgaacattgctttaaataagttcaacttttgttatcaattactaaatgtaagtatataccatcccacaatagtaagagatcaaaaataataataaaacccacagtgcaatgcatatgacatattaagtttactttcataagttaatcatgcgatagtcctgagtcgctcttaaccgcgagcacgactgatataccagttttaacaccataattttatcatgaacactaaacaatagaatcacaataataaagcatgatcatgaatcatatttatcttaacacccaaaaccacatagagcaattcgagacaccactttaagacattgttggagatgctcttaggacaatattggttcttacacctataacttcaccaaatattacaaacatctctaagattgcatccagcagatcgtgtatatggccatataaaacattgtttttacagtgtaaacaccattgtttacaaaaagtttaaaatatgagatgtgatgggagatgagataggagatctcctagagatcgcccaagttgagtgtacttcggtagggtaaaaacatacattttttgcgaaagcaaataaatatatattcttaataatcgattgccggttagagggaatccggaggtaacatggaacttcacataaccacaatgtgaacaatatgcttgtctcgtcgaggtagaacgacgatgagctcaccaccacaattcacagcttacaaagaattggtaaaagtcatagaaaatgtaaattgagttttttggttagcccaaatgtaggaatcctgaggagagatgtttatattcatcatggattcaaatggtgtcaaaagaggctgagacagatgtaacagatctggtagcaaacggcgagtacaaacctgtgaagcaactgtagcagaaccaaacggatgacaatgtcaacgcgactgtaacttgcaggttgaccactgcatgaaaaataaaaccacagtaggtccatccaaccgtgggttcattctgtaaaaaaccgaaagggggagaaaggaaactcaaactatggtaaaaccaaaaccaggggcagcccattccgggcagctgtttcccaatccagtcctctacaggcagtatcggatcttgtgtgctcacctgacacccccaccaaccgaaacagtaccacgcacacgtaaaagcggggagcgccgctgcgcaggggatcccaggcggtattgcgggaccgtgggctcccaccgctggaaacggtgaggcgcggggctaaaaccgagtacttgtgcggctgaagcggtcgcagccgcacggacgaaaccgcggcgatcgcccacacagctcccctccaataaaaacacccaccttgctgccgatttcgggggcgggagtgccaagtggtttctagagctgggtagagattggcggtttgccg

SEQ ID NO: 143 - DNA, 3000 bp, Zea mays
aaatttcctgttggaaattaattaattaattagccacgaaagaaagcggccagctgccaaaatatatacttggcgcgcgcacccttgtttctaagaatcttcttccctgtcatccaccgaattagtccgttgacctgtgtcacgtctttcttccattcgccgaattctgcgtgaccacacgtatttttttattgtcccccctccacacctcgcttttgtttttgttgttggccgggtcacgtacggtcgggtcgacgagcatatatatagtatacacgtagctgacgaattttcctaatctcagtttatgcatggttttacaaaaaaaatgtcgaaatcaataagctgcgattttgatcaacaacttgcgcagataaaatcgtgacgttgttgtgtgcacatttccacgttgacgacacggcgtgactttgctcatgccacgtgcacgtcaacaatgattatactactactacttaccgaacggtacgtacgtacgtgcggctgctgtcgcgtactactgcctcttcacgtttatgctgataacttactacagagataaacaacgatcgagaaagcgtagatactttgctgtggaaatcatcacattttgctcctgcaagatgcatggacggagatcaatcatcgtgtgcatgcatggcaaccaatgcaagcaaggctgtttatgtttagtttgagagcgggcaacaaacatggccacatgacagttcttgtccctgtcatgcatgcacccactctttaaccaagtgggaatttacttattggacagtatttttggatacatggatttcctgcgtctcgaggtagaacaagcacccgtgtggccttatatatggttgttctagtactcttttttaaaggaaaatagaacaaattgatttgtttgccaataatatattaggttcttattcacaaattcactgcaaggcttgatcttatccttgaatcactagtatgcaacgcaggggtggacctagcccaaaataagagtgggggcctaaatagaggtttagtagctaataaatttttgtttttacggtaaataatgtaaaaggcccactaaaactagaaaaatcgaggcagggcacgtacgtgcccccgctccactaaaactatatctattgcactccatctattttaaattataagacattctaataaatttttaaagagtcaaattatttcaaatttcatagaaaaactgtaaagatttatgacattaaataggcatactacaaaaatataattaataaaaaatctcatagtacttatttgtatcataagtactattgttttattatataaatttattcaaacttgggatgctttgactccaaatttttttttgaaagtgggaatgatctataagctaggatgaaggggtatgtatcatgtctcatgtgtgcgctttagcttaaacaaatttggtggccagtccccccgcacaaaaaagaagcctacacatggtccgaagaaaagtcagcacactttgcattctctcgccaccttgtactaatgtgaaagcatgccgcgccaagactcgtcgttggatattgaaagtcctagatcgatggacagaaactaaaaagagctgtgtgagcatgactggagaactaaaaacagacgaagaaaataatgtgggcgtttccaggaatctatttattattatatgaaccaaaataaactgcagcagcggatatatatatatatataccgtgtcctttcagaaactagaatcacaagtgtgaatatatatgtactttatagagagagagaaaaaaaaagtctacaagacattattacgtttcaaatttaaaaccgacctacatatatgtgtgttttttttttataaattcatcatgcaccattggatcgcccatgtgttatatatagtttggcatctagctagcatcactacttgattttgttgattcgttgtcccatgcaccatgatgacaggatactttggcacccaaaccaatagagaaaaactaaggacatgtttggatcctacaagctaaaataaaaatgactaaaatttattcacttaggagctaaagatctgaacaggaacaactaaaagtgactagaatggtaaaaaaaacatcaatttactcacttttatctctacctgtttggatgtttggatcttcagctcttaaataactaaactgtaatcacttttgcattagctcctaggatccaaacatgctctaaatggggttaatctcgatggtaaaaacatgtcaaactctcagagaacttgctcttgtccttttactagggataggaaatgagtctgtagctcaactgattaaggtaagaggtatgttcatactttccatagaaacccttggttatagttatataccaagtactggttttatttgttttcttttttttttctcgcggtatacttaattttaacgttttcttatacatgcgcgatgcttgattatagcacgcagccgacgtataggtatcaagtacattgcacgagtcatacacgtctacatccgcattcaagttgagaaaaaaagtacaatagaaaaaaaattcaacatctggaaatatattttgctaaaggattggaattaaactagctaggcctcagggtatatacgcaaacatgtgcatggttccaaaatagaaacatgtcattctctatatatagagcgtcgcgcggcagcagcataccatactaccacgccctcacaggcctgcatcatctatcttcttgtatatcatcttgtcccagccctagcaagcaagcaagcctagaacagtaaagtctcgtcaataattccatactgtttctagctatcgcctagcggcagcggcgaatactatcacagtccggcatcatcagatagaggctgctctgctgcaggcagtacgcaagcacgcacacacgccaagaaaccaaagcgaagatagcactccagagggagcagcgcgagctgtacgtagctgtagctcatc

SEQ ID NO: 144 - DNA, 3000 bp, Zea mays
ttaactcgaatttctaaggacagatgtttcttcttccaagaggcttgaagctattttttgtctattaaaaacacgaaaaatacaatttgcttctcactcgtataaaaaaacatgaaagcaagagaccatttttttaaagaagaccacacaaaaaaattgttccttaataaattttgaagtgtctttttctttaggataaataactattcaaagtcatacaacaacctaaccatgcagggacgaagcctagccaacctaaccatacagagaccgactcagaactttatttagaaggaactaaactaaacctctatacttcctcttctacattatacttccttagttctttttatttgttatgttttagtttaaaaatgaactagtgaatgataaatattcgaaaacgtagacagtaatgtatactcttctaaattttagagaaactccagtagaactttatggtctcaggaacagtaagacggtaggaggctcgactgccgcccgcctcaccgctgtctcactccctgtaaccatagtatactagtctacatgcatccagccggagtcagggaaaaaagccagccgttggcgcgctaatcaggccaggccaaaatggccaaatgagcaagcaggccactgtccgtcggtgacgtgcgggcccatgagccagagaagcaacccacctgtaccagtacggcagtactagtaccgcggacaagtcgaaaaaccctgcgcaccgctcactgcttcaccttttgcgcaacagttcccaccggatcgagcccaagaacaaatcactgactcgttgggtccacctttgctgggaccatcagctagtgacggtggcgtgccacggaccatgtgcccgaggccgcgcatgtcaaaacgagatggccgggggtggggggcgctgcaaacgtggcgcgggcccgggctccctcgcacccccttatcctctgtggcagagggaaatgacgctcttaccctcgaaaaagcgcacaaaagcgcaccggcgtgggccccgccacctcatcctcagcaaatttttcctctacgctaccagtctaccgctagcctgcctgccctcagacttcctctttcttccccttctcagcctttccctctcttctctgctctttgcatctctctcttgttcctcccttcctctctctaaaaaagggttctgatccctttctagaagctcctgggtttctgttgccgacccgagctccccaggggcgctcaggaggcgccgagccggcgaccgctccggcggatctgaggagccgccgcggtcgctttgcctccggtgagttattcttcctctcccttggcgcgggattttttatgtggggtcgacctcttccctcggattcgctggctccaatcccaacgtctgattcagcaaatacgtatcattttgttaccggccgctttatcgttcccctttcctctttccggtgatcccgatgcagctgcgattttatgtctgtttgtgtttcagactgggttgatgctgatttatggtgttagaaatggctgtttgtatttttttcttcgttatattttgttttgctttgttgtatacttgtatttgttttcagtttaatatatgggagacatgaatcctgtaagaaaactgcttgtttttttcccttggcctaaacgaccatcgtatttgccgcctcacgcagtcacgctctaactcatactggtttttcagtgctcaaattacatacaaaattccatttaaaaaataaaaattgtttctcatatgaataatcaaaacatgttcttttaactatatccagtcttaggtgcaaagatgtgaatctaatgctttaagaaatgtttatacttataatccttttgttattgataagggcaatctttttgttatgcatccgtatgagcacacttactggaaatatttgcatttttccttccaaatatagttttttcaaaaaaagtcaacttcacttcttgctttgcacacataagatttccttagtctgaaaacttctaaacaactcatgaatttattttgctggtgaaaaggttaccctctgttagcttaaataaaattatcaccgagctctgtttgttggctcatttcattggtccaatcattcatgtttcatatgtttcctccctaccatagtattgcgctgtgttggttgcttggagaagttggatattatataataggatttactaagaaatcactgtcagggatgactaagaattgtgtcttacgtcttatgctggctggcttccatttttttacacattatctcttctaggattcgtagtacctagtgacctcgtgggacatatactcgcattcttgcaagcacttagtgggggctttgaattataatatgcacggagaacagaagatttcaagacttgttgcctgcacttttgtagtgggtttcgcagttctttatgccctggtcggcaaattgaggctgagtccactgatttatgagtcaattgatacctagaactgtctcattgcagatggcggctacatgtcctaattaggaagcaaatctttattatccttgatatttatattgcttgtagctgatgtaagatgttgatgggtggaacatgtttgattgtttctcttggattaagttgaaaaaaaaaacaacctgttgtttgggtggatgccatggtcagagtaactgccagtaacaaatttctgtcatcacgtcagtgtcattctatcatgtgcatttctctaacacgatgtatgggtactagactactagttcataaaataatagttgcgataattactgataaaatattattcatatgcatgttgtaaaagagccagaatgattactgatgtagtagtaattctttttaatagttgcgatactgcacaggttccttgtaaactattgattgggaaacactctgaagaagagtttgttggctgcataacatctcctgaagctggtttgaagtttgctgataggaaagatc

SEQ ID NO: 145 - DNA, 3000 bp, Zea mays
aaagagacatgttgcacaacaccatactaaaactatggttagtctcaatattaaaactcgatgtgtgaacatctcattgataatgactcattagtcatcacacattatttaaatattgagtaaaacccaaaagttagttatcaattgatttacatggtatctatgcttttactagatgtctggttatctgttgctctatgagatgtgagaccagtgaatactttcctatgactcagtaagggcttgttcctttcatccagatctaagtggattggaggggatcaaaggatattgagaaggatcttaactgtggatggatcaaattcatctcaatcccctccaatacacatggattgagattaaaacgaacatcctctaagtaaggctctacactatcctgcacatggtcaggtcatcaccagaagagactggacatacacataggatagctaggtttgggttcgccctcttatgaggcctattatatattagcttgtgagctttctagccatcccacatttacccatacttggcaagaaatgttttaccatcttacttaggctacctccaccatccttacctattctacctcctattttaaactacactatataaaaagtgtagtctacaacacaaaacaatgttttacacggtcatatgtacgatctactggtcacagcattacaatggaacctatcaactaggacaaccaagagaatcaacgttggttcatacaggtgaatttagtacacactttgcgaacacctttaactaggttttagattattgtagaaacaaaacatttcagatctagatcacctttaaaagagaaattaggtgtcttagtgtatcgcttgactagtatacaaatggtaattggttccaaatgattctcccaaaacgtttctctttatggcatttagtatctactctagtgattctagtaagaaactaaaacatttttccttgccaaacacatcctaagagcctgtttggatataggagctaaattgagctgactaaattttagctcctccttgcgagataaaagtggctaaaatgatatattataacaattttaataatgtttagctcccctgtttagatcttgagctcttaaaataactaaagtttagtcgcttttgttttagctactgggatccaaacaagccctaagttcaaaaaagagaaaaaaatctatttgatactagaaaaacttttgttttcttatttgacgctcaaacaccagacaatgcaacattggattcataaaataattatagaaaagaaagcactttttcagcaattgtccaatgatcatcagtgagtaaaggggtgccatcatcattcaaaggatactgagttttgataaaacagaaaagctggacttgtatggtactaggtgtttaagcattaagtaggtaaaattctatctaacatccatatccacaccaaacttacgaggtacaaatagccatattcacacaatagcttttgtatgcagctatacattgattagaagcatttaaaaatgttatagcatttctaaaatcatcaatataagaactaaaaaatgcaccttatatagtcggagcaccggatatgatggtcggaatccaaggaccaaggtacataagaggggattagggttagggttacggatcgagagaggagaggttaggagggagggagtatagatgtccaagcacgacacacgaccacggagacgatgatccttgcgcgatcggagcactagagacgatggtcggaagctggacccaagaacgatggaaagcggcggtgggggaccgaggatccgggagagccacgagcgtaggcggggaggggattagagttggggggagacggactggttggggcgccgagctgggaggaacttgggagccagagcaccgtgccggcctttacattgggccaggtcgtactggcctaggcacacctaccgccaggccaggccatgccgggtaagggctgagctacaaacatgtcgtgttgcgggccatccagtgagcccgatccatacgaacatctatatatatgaggaaaaaaatttgttgcagcccggctgcaaaccaggctgtttgcagcccctcacaaaaaggaggataggcccacccgcatatcaataacacaactaaaacgttatctggtagacctgtaggtggggtctatccgtctttttgtgaggggctgcaaacagcttggtttgtagtcgggctgtagcaaatttttttccatatatatgacacccgtgttgcaagcgggccgccgtctccggttaataattcactggattccagtggatttcgccacccggcagtagaaactttacactgcaggacattacctggaaatattccattcgtcgatcgacatcgaaataatgattctgaaacggtcttcctctccagcgcagcaggtaagctgtagatttccatgggcggaaaaagtgcacagccgatgtgatcactgccctatcgcgagctcgtcgtgtaaagactaggcaacgcaaccattttcttccaagcgatccagccatccagggatgaactgcccagataaacccactggctgtctatttcggcggcgatgaaaaaagcacagacagaaccaatgagctgtccatcgatgtgcacatcgatcagggccaaagtctttcagagcggtattggatatacattgttctgggctccagtcggtctcagctcaaacagtggtttccgaagtatttcttgctgggctactgggttcgttgttcttgtccatgtccttttccatggcgactttgcctgcctgcctgccctttttatactccctcatctctcgagcgtccttggccacactacttctcacgatcctagctagccacctccctcgattcacaagtcacagggacaacggctggttagcttctgagatttctcaaaaccactctactaccaactagtgctctagcctctttcaagctaagttgtaccc

SEQ ID NO: 146 - DNA, 3000 bp, Zea mays
gggcaaaacaaatcgcaaacgaatgaagagtgtgacatgcagatttgttttaccgaggttcggttctcgcaaacctactccccgttgaggaggccacaaaggccgggtctctttcaacccttaccctctctcaaacggtcccttggaccgagtgagcttctcttttcaaatcaaatcgggaacaaaacttcccggcaaggaccaccacacaattggtgtctcttgccttggttacaatggagttttgatcacaagaacaagtgagaaagaaagaagcaatccaagcgcaagagctcaaaagaacacgacaaatctctctctctctaatcactaaagccttgtgtggatttggagaggatttgatcacttaggtgtgtcttgtattgaatgcctagctcttgtaagtggttgagaggtggaaaacttggatgacttgaatgtggggtggttgggggtatttatagccccaaccaccaaactagccgtttggtggaagctgtctgtcgtatggtgcaccggacagtccggtgcacaccggacatgtccggtgtgacagccacgtcaccaggtcgttagggtttcgaccgttggagctctgactgctgggcccccctggatgtccggtggcgcaccggacatgtactgtagagtgtccggtgcgccatgtcgcgcgtgcctgacttctgcgcgctctggcgcgcatttaatgccgctgcaggtgaccgttggcgccgaaataaccgttgctctgtcgttacaccgaacagtccggtgtacaccggacatgtccggtgaattatagcggactagccgttggagatttccgaagctggcgagttcagagtcgcgtccccttggagcaccggacactgtccggtgtacaccggacagtccggtgaattatagcgcggcgcctctgaaaattcccgaaggtgaagagttcagcttggagtcccctggtgcatcggacactgtccggtgcacccgaccagggtgccttcggttgtccctttgctcctttgtttgaaccctttctcttgatcttgttattggcttattgtgaacttttggcacctgtagatcttatagacttgggcaaactagttagtccaattatttgtgttgggcaattcaaccaccaaaattagtttaggaaataggtgtaagcctaatttcctttcacataatacttaaactaaaagtacaaaataattagaaaaaatatgtatcacacttattgataaatttttaaaatgtgtatcgcacttgttgatatatttttaacttatactaaagatgattccgtttatggtgttctttaaaataaaaacttttaattacgtatttatatttaatcttctatagaacaacgttttaaaatgcaattattatcaatccattgagagtgcatttggttatggtgtctgccgcgagaaaagttgttttctattgtttgctatggaaaaaaactgaagtaagttgtctgtgtaaaaaacggtggaagtcattagttcaaaccgtcgtgagttgtatatcgtgaacagaccatatagcgtacatttgcactgtatttaaatatacctcttaataaataaatctaattaactattttaatcttatttttattttctatttgccgtatctttccattaatatatcgagttagtaaatcagttttacaattcaatttctgatatttttattaaaaacattttttatttcatttattagaacacctaattattcattttctatttgccacatctctttattatacataacgagcgtggataagcagcaaaagtagggtccaaactgattccaaatttgtactagagaaaaggctgaaaaagtcgaacccactttgatttaactcattcgttttccgaagtagaggcaggtcaaaaaaaaaaaaaaactgaaccaaacatacaccgagtctttcttgtgttatagtactgcggatgtataacctgaacaactttaatattgacaactttcgttgtcaacctgcagcccctgtatcaaagttagactctccggcctgatatattctaggaaacttctattaaaacgaagctagactctccggcctccccgcactattattcacgcggttatcaaagttgcattcggttttgagacacatggagtaattctcaatcagctgccgccgtcagcaaaaaaaaaaaaaaaaaaaagtcagccggactgccgcgcatggatccgaattccgatccttcaagtatggataggttaatgataacgtaagctactgcttgctcctctaaacaacacgctagcgggcgttggttggttggacgacgtggctcaaggcagcatccaagcaagaacccatcacaaggatatcattacaattacagcgtagctgaaggcggtgtatgaaaaaaagcgaccgagagaggtcgacgcgccaatcacaacaatgaagcctggtccggccgcgaaagctacctgccaccagcagtcgtcgagcaaggatttaattaataaagaacaaaaaacaaaaggaaaacgcgctggcatcagcgcaaattgggcttgctggctgcggttgttttcctagctagcgcccctcccccctttgaccggcggctatctgaagcggcgcgacatgcttggggttctgaacgcatgggctcgcgcgcgcgcccgcccatttgcttgcgttgacctcttcccaccaccacccagcactccggccgcggaagccgcgctggggaggcggttggtgtggtgccccgccggcttagattgatgaatcacagcgcggctcggtcgcgtggactcgacctcgtcgcctttagtacaagttgcgtcctgcgggacatagctctcgtcctccgtttcctagccttgccagtttccacgacagagagagagagagcgagaggaggaaagaagagtcatcgcagacagaagagggtgctccagcgtgcatctcgtcgcccgccgtcggcgtgattgcttggcagcagg

SEQ ID NO: 147 - DNA, 3000 bp, Zea mays
atttaacgctggctaatataactttacactaaaacaagtcaaatattaaaaaccggaggcagtatattttttagttagaacaaaacacgaaataaaaatatatccatgtataaaaattatataattcataaaaaagcaaatgaaatgtaaaaactacaaacaacaaaattgacataattcataaaaataactgatacactgttactcttcggcatctttctctcccgtctctttgtacttttttgcgtctttgtctaagtcaacatttgagtgatccaacaaattatttaattattcaaataatttagattgagtcatcctctacctggtctgtacaacttgctcaatagtttttctccataactctagactagctgctacttgttgctatttataaaataatcgtttagttttataactttcgatcttggatgtagtgtttctcatttgcgtagagtgttagttattttggaataaattttaaatcttagaaagttgtttgttttgggacacaagaagtatatgtatagaaaagtcaaaaaatttataacagaatgaaaggagtacatgtataatccccaataaaaaacaaacaacatgttccttgggcttaaagccacccgtttgggcggctgctgccaccattccaagaatcaatacattatacaaagaatccattacgatactgaatacaaaaattctcagatgtaaaaccaaaaccgaactgaactataaaaaaactaaaattttggttcgatttaatacagttcgggtttagcgtaaaaaaaagtgcccgccctaagactcgcgaggctgtgtaaacaagcggagctgttattactgctagactggagagtactactgttactaccacggtttacaaaaccgttccagagttaaaaaccgccccccaccggtaacggtttaccaacggtaaaccggtaaaaaccggtaaaaaccgatcggtttgaccaactcaaatcaatttgaatttgaactggtttaccggtgaaaaaccggcgaaaaaccgctttaaaccgccggttaatcgcgaaatcaactggtttttgctgttttttacagaaaatatgaaattttttgacaagatttattgtagtttgttcaattcacattgcacactaaatattaattaatccacacgacatgtattcaccaaaataacatatagcatacatatacaaccacaaactccaattctcatgcaacaaacaatcagcgaacttcgcaatactcaaatacaagttcttttataactctccaacgagtcaacaacacataggtcgacttatttcacaatactcacatgtttatctcgagtcatattgatagtactcaggtatgttggaaagatcgtgatattgttccaatccgttatagtgataggtctatacaaaatatataagatacattagcgagaaaacaagaatgacaaatcaatatttatccacaaagcaaaaaacataccggtatgtgtgtttggtgtttgtgtattgtatgtgcacctcaccaagtgttggacttttctcctaataagcaactcttaggaacacatataaaagaactagagctaagggttctagattgagtcttgtctagacggatagttattagaagaaccgaagctacttgatctacggatttcatcttggacaggaaatgaaaccgaaattgaccactaaatgcctaaactggacttgagctacggatttatcttcacttttaacatataacatcttcacatatagcatataatagtaaacaagactaatattgtctaaattgaccactaaatactcaattttggcattaaatccggttttccggcaaaaattggcggtttaccgatctcaaatagcggtttaccggtcccaaaaaacggtttaccaacggtttttggtatttatgaattttttcaaatcttttgaatttcaaacgaattttgaaaaaaaaccggtggtttaccgaaaccgcacctcggcggtttcggtaaaccgaccggtttaccgccggtttttagcggttttgtaaaccatggttactacacacggaaaaggtgcgaggccaattgcgccagatacaaccccaatccccaagtgcccgcctcgtgctgttggaccccaaatcctcccacccagcatgcatgtccggtgtccgcgttagattaaagggcatgtttggtttgtgtctaaatgtgccatactttgcctaaggttagtcgttcgaattgaataactaaccttaggcagaaaagttaggcaaagtgtgacaattgaggtaacaaaccaaacataccctaaaagcgaaactctcttgccacaagtccaaacataccctaaaagcgaaactctcttgccacaagtccaaacaagtgttggaacgctatcaagctgatttcagatttaatattaaagatccggccggatgcatcgcgggcatcccgaagaaatacttaaaaaaaatacatggagggtgagagttagacggtggttggctgaatgaagtgtatagcttagattgtcctgaaatgattacatggccggccggtgtgttctgtcagtaatttttatgggttctgaaaaatatctgcagcgctatgcaaaattttggctttttaaaactttgttcggttattcctgttccatatagattgaatttgattaaaaaaatataaaaagattttaatttgttttagatttaaatatatccaatcctacctaattcataaggattaagagtaaaagctaataatcccttatcaggatgaccagcccaacccaggttacccagctaatcccagcgccccactcggtctccaaaacatttgccgtttatataacccgcgccgctcgcaactcgcatattgtggcagccaccaccactacccagttccaagctcgctgaaaaaagcttcgtccattgcatcccgtccggcaggccaaagcctcgctcggacagtcggaccggtccactacaccacca

SEQ ID NO: 148 - DNA, 3000 bp, Zea mays
tttaaccagcttctataaaattcgttagggcaaaaaccatccaaaatcaacataaacacataatcggttgagtcgttgtaatagtaggaatccgtcactttttagatcctgagccctatgaacaactttatcttcctccacacttaatcgtaatgatactcagattctctccgtagccagattctccccacagccagatttttagaaaagctggtcagaaaaaagctgaaccaaacaggccctatagctctgcgccctacgcggcgcaccaaatcattggggcttcaaaaaccgatcaggacccattagcaattaatcgtgatttatcaccataaaccaatggaaatcgaccaaatccgaatcaaactattttttaatccgctcagtttaacatcgatttatccgtcgatatgaccggttaatcggtccagaactgataaaccaacagcagatcaggtgaaactaaacctcttgtttttgcaagtaaaagcgcgtttagatcacaacaattgaattgaataaaaaatggcttgaatgttaccacaagtccaatacatttagcagttaaaatattacatatcacgctttcatagttcacaaataatatcgaagatacaatgcaccctctggtaaagatcattcccgcgggtgcgtgttccactgatcttgtgccatattataatctttcgatgtgagcaactaataccctgctccacataagtcatttcaaatctggtgacattccacagaaccaactcctcatcgattacctccttcatcatggaatgtaacttgttatgattgtaaagaaatcgtgatatccgcctagcactttgaaccacaatattatgctaaaataaatcattctccttgaacatcaaatttatggtataagccacacacgactgtcgcacaatagaaggatgcttcacgactaccatatgacatgtccttttgtagttcgctccattgtcaatgataatctggaccacatactctgaaccaatttctatcatcacgtccatggtttcctatatttactatccactgtttcttgcaatacttgcacttaaatctggtatatatatgttgtcctcgggttcccgatctaaatcgatttgatccaacattcctgaaaatagcaataacatgatctattattacaagtattgttagcctatattgcaagtaagtaagtaacagtggtattttgaaaagctttctagtcaaaagaaactctagctcctactcgaccaccggttaatcagtcccacacaacggtttatcggcttcgaggagcggctaatcagcaaccctagctgatacatcaatttttatttgtttatatatttttttcttaaacttccatccgttgcccattttaaattttggttacaacagtgagtcttcaaataatacacagtttttttatacaagaattggcaacaaaagttttaaaaatctacaaactttcttaaaattaaaaatcgaaaacaggtgtaccagcgttatcggccgacgctgattagcgattattatgtatccggtcgataagctggaatggataagccgttcggtttcgtgaccctttgccttgcctgacagcaagctgcgactgcgagggaggcaagcggagacggggccgccctgggtagtcgctcgtcgggatgggattgtaggcgcacgccggatcagactggagagaaattggaacgagtcagcgaaccgggtcaaagccaaacaaacggcttgcgcgattggctcgtgggctcgtggctatagcgtgaatgcgtgatgagtggacgacgtcctcctagtgacgtcacgcatgcaacgctgtacctggtgcttgaggcaatgggacccagagatggatgattcgcgactcatctagaggctacgtaaacgcattagtaatgtatgatgtatatccttaaccaagaaggaaggaagacatgccacagatggtgtatgccagccatacagctagtactgtgaatcgttttttatataatcggtgatacggtgtgtaattttgttttcaactccatcagatttggaggatctggtgaaagacctcttcaagttcaactacaccatttttggtaaaaattgagagtgcatataccgttttttgtggattgaatacacgttagatccggtagttttcgctataaaattttatcctcgtctccttttataaatttaggacgtatttaatatggctctccttcacctagagcagctttactccaaaactctgcgtagagtagatctgttccaaagttagattgtttctcgtaaccggtagcagtggcgggaaataacttaaaactccatgacaggttgttttttttttggagtttcagagcagtaaaagagacactcaaaaaaattatactacaactccaaaaactttatataatttataactctagagttaaagtgtttgtcatgctgtggccaacttctccttaaagttttactggagccagacccttgtagtcgatgaagctctactaaataatgcaacatttagcagcatcagtggcaccagcacaagtgctgtgctgggggaggataggatagctatccactgctgaactactagcgacgtcaaaaggcacggccgcacgggcccacggaccgaccatgttgaatatcggcgttctgtgctgggccactagaagtggctgtccctacttgtcattcacacgggcttcccccaaaactaaaaccgaaactactcgtggttcgtccgattccctggtggcgggcccctctcacgcgcactttgggccccacaagtcgcccgccctagcgcttttctccttgctccgttctgcccggcgaacgcgagggtgccagctcggccgccgggccgcctattttaggcagctggagtgccggctcctgtgatcctgtcctgtgcaatcaaatccaacagtgtcccctctcctcctcttgtcgtccaccacccagtccccagctgcctcgctg

SEQ ID NO: 149 - DNA, 3000 bp, Zea mays; identical to SEQ ID NO: 148

SEQ ID NO: 150 - DNA, 3000 bp, Zea mays
gaggtgtacgtccccgaggcctcgctagagaaggttaccttcaagactggcactggcctatccgacaccttcgatgcctctgcctttgcgctgggagagtaattagcagtcataaaaatggttggcttcaaaagacatgcataatctatcttttgtatttgtaaaattttcatatatattgagatgagtttgtggtactcatgagcgatgcccattgaaacatttctatgaaatttcttgtttatcagatagttttcttttaaaatatctcacttcaaaacattaaaaataaacgtccccgtattcatagatgagtttttatattggagcatataggtacgtatttattactgttgagtttgtgatccaaattctgaagaaggcggccaagttagcgagcgaagcggaggcccgtcgcccaaaagtcggaggtatagctatatctaaggctacatacatacttgcaagtattatgcagtgtgtgaggctacaacacctaccaactatgttggacacgacaatgtaggacattgctatagtcaagcttgaggcagcagtataccatgagtactatatagtgtgtgcacctatagcaactaccaaaggcgcttacaatacaacaactatgataaaatgggagtagtttgacttttggtgggtgaggcacgccatcgaggcaggaatgtaactctccactatcttgtgatataaagagaagtcataaagcaacgtagaaaccagacacatttccatttaggtcacgaaggttgcatccaagtgtcatgaccagggctaagaacacactagagtcgcaactcgcaagggctactttaggttgcaaccgccaaagtccagaagtgttgaagtgcatgtttctagatcctctcgttagctcagttatcaactaaatatgacaacctttcgtatttgcttctatacatatatcgtacaaaaaatatagggtattacgctcagatggcctaaaactatttatatgatatatgtgaaaactatcgtgttagtgttttatggctaagcttacatcttttctctgattttctttggtacccttggtatcatggtgtcgtatcccatggtagtagccatctagtctaattaaataacggctcacaagcatttgggtgtaccacaacaaagaagttatgtcaagatcaaagcatacaagatttgctaaaggggagagattttgaaataaaatgacatcatctaacatgttaattaccgtagcacaaaagctgggcaaaacgttgttgatctggctcagatcgttcgttgttgattttggtaatctggtcaatctggcagaaaagaaatacaagaatcttatatcgcagattctcgagttggcagcaaaatgttataaaaaattaattatgaggtggcgacctagaaggtggcaggggccagacacttgtcagtccccttatccttttcttagatgctttattaactgtgggttgcttttgtttcttgctttcatcgggctagtgcccacgatcttagacttgttgatttaaacccttttagcctatcattttcctccttatcaatatattaggtagatttcctgcctatttcagaaaaagctggacaaagattttttaatgtcggatccacactctctaactcttcaagtcatagtctgaattgttgtctcctcgtttagagaaactccaataattctctaaatcttaaatttaaaaagtgaatagaaaaacgcttctctaatagttcttgaaatggacttgctaaatttagttatttgctatccaacctcatttactctccagatttggcagctcgataacaactctctaaacgcagttgtcgccgatttcttcacacctacgtgttcattttcccttttcccacacaacgactagccaggcccgacgtgctctttttgtattgtcgcgaggcagccatgttcgacacgcatgaaacaaccttctcctctgtcgtcacacaatcggtcacccataggtcacgtcaccggactatcacttcccagtgggagcaggtctagcaaaactaaattcaacgggagtaggcctatgagaaattgttggaggccaaactattttttactctcaatagctatttagcaacttgctaaacataagtttagagagctttttaatagagaactattagagttactgaaaaggctaaaaccaatgtttcagttaagaaagctttcaatgctaacttctgcttatgtgccttttagaccacacatcctcttgagtacaaggaacacttatctttcaagttcatgtaatagtaaatgatgtttgccatcttttcatgtgtgatgccaatacatgaccgctaaaaccgcatggcttctttaactgaaactgtattttttccctcactgtttgcatagtcaacaacatccaaacctcaccaataatctactataacaatttgtaccacatcaaactgtagcagttctcaacaaacaaaagcagaaaataaagggagaaaaacgcagaccacaacatgtctgcccatgcatcaagtgctgaaagtgagtattgtatgtcgcccgttgcgttctagagtcaggtgaagacttgattcgacttcggcattacagaactttcttaagttaaaaaatgtccttttctttcttatactagtgagcttgctcagaaggtatatgttctgatttaaaacatgagaagagaagcagggcatagcaaaatccaaagttcaggagcgtcaatcttgacttcgtttgccacaaaagaaattcaggggtggcaatgtggactttgtcaaattcgacgctctctgccaacgaagtcaaataggactgcccgtctctataggagctgcatgcctatataaatgtgttgcagccccttctcccatcacacaaacatttcatcgcctcctaaagcagcatcggctactaccaccgactcctgctcacacagctcgtactgtgcagcacatagctagtgaacgacc

SEQ ID NO: 151 - DNA, 3000 bp, Zea mays
atatgaatatcattttttacaatcacggtttttaatctttcgagtgacttgcaatttaaatctgaattatcagtggaaaattcaattaatcgaacaaaatctagtagttatagcaaacacttttataattgtgccaaaatcgtacatgtgggtctacatagtataggaacacaccaaaaaaagtctagtgagaaaaagaaaaaaaatgaaaatatgctttgccgagtgtctgccggaagacggtcggcaaataagctattttgccgagtgtcaacgtctagcactcaacaaagttaacggtcgtcagctatagacggacgtcgcatttcgccgagtgtttgacactcagcaaataatgctttagcgagtgtccgacaaaatggaagaaaattctgtacataccggatgtaaacgttatcttttacaccccttacatccatcactcggaggcccacaaacacagatcaaaatttacaaaaaaaacctttaataatttgtttttcttctatttatatagaccagcagctagtatattcgaggggttgtaaaagagatcctttacatccagtatgtaaagaagttttttacgacaaaatgcactcggcaaagagtcggattttggtagtactacaccccgctgcccgcatcagcatcactagtggcatagaaagagctatggccgtagctagcatcgtcgcctgaaaacggtctatattcaaggcacctaaaatacaacagcttgatagctgtggcttgctgcgacttttaatctggttgtggcttttacattattttatctttatgaattgtagctgcaacagttgttgtcattagaaaaaaagtaaaggaaattgttcggagatcgatgctctatataaactgtatgtgccctcaaataattattttgaagtacatattacatttgctttttgaagtagccatacatgcatatatagtgcatatacacacatcgatcttacaaacgatggacgtcgctgttccgctgaccctaggcgcctcgcgttgtcatgtaataaacgtggtgcactgctgcaggcaggcaggggggattacacacatcggtttcaatttcaacagtgacatgatatattgtggaacagtgtgagaaaaagacattacatttctctgtattattggatgtgttttatacgtaccggggaccaactgtggtcgtacgtcgccatcatatagagaattaaatggagcttttttttggaagaataatcgtttcctgacactaaattattacatctgtgttccatatttaggccatgtttggtttctttagtctagagactaaagtttagttaggggactaaagtttagtccctaacatgtttagttttaggggctaaaaatagtaagaatatactaaatgactaataataagactaaaatagcctttaacattctcctgttattagtacaattgaactaaatgaggggtaaatgtgaaattaatatggtttagtctcttttagcacatatgtgaaggactaaagactaaatcattttagtccatattttagtcctagtgtttggcaaaaaagggactaaatgagactaaaaactagagactaatatttagttcctctaaccaaacaccccttaacacatgctcatctttttctccaaacaaatgcttcttccattttttttatttgtcatattttagtttataaataaaccagagagcaacaaatattggagaacaaagatacgaggtcgacagactcgacactacgcggtagaactgcacgtgcaacagcgtttttttatccattgcaacatgaaaagaagttgcgatacagttaatctgtacaaaaacgttgttcactggttgggccgagggccggtctcatttataggtgtacatttgagccgcatctgatggactggtctgaagtatggaaaaaaaacacgacccagatacgatattacccgaaatattttagtgtcgggccgggtttgggccgaaaagtcgcggcctatgggcgggcacgagcacggcccgtttaagtcagatacgaaatggttcatataaagacacgaaaaggctcatatatgtattaaaaccacacttcatttcacactttcatgtactttataaagaacacaaagcaagagataatgctagttaaatgtttttttagctttgaattagagtatgtgatgtaattttacttttgttatgaacattagataataaactgaacttacaaactttgtatatagctgattatactcttttttttcttctaacaaaatgatttgtaaatgagatagtcattgcatacctcgggtagcttaatacaaatattaagtttgcttttggtcaaatttatttgtcttatattttatttgctttattaaatttgttttgaatttagggctctgatgtgaattcttggccctaatgtgaatttcggaccctattgtgaatttcgggacaaaaattgaatttcggggccacccgaaatgagtccagcacatttaaacaattacgtgtcgggtcgtgggccaagggctaagcccgtgggccggcccggcacggcccaaaattcaaacggaccggtttaacccgaaattcaaacaatacagttctttttagactgagccggaccgggccgggcggctcgaatgtacacatatagtctcgttcgcacagcatgcatgcagcagcaacacaacagttgcacattcacacgcgcacagtgactgaatgaatgaatgaaggtgatgtgttctgtatgccctcagaatagaccctaaatccctaatgaagcatcggaagaagctgcatacaaactcgccctataaattggagggcctgcgctcacctcgatgcatatcactcactcacaagcaggcacagctagctgctcacagctatacatcggcgcatcgccattagcagcggcttgctttggtttctgattgattagctggttgttgttcagttagttcgagtagtagacg

SEQ ID NO: 152 - DNA, 3000 bp, Zea mays
gcggcagaactcgtgagtcgtgaccctgagagggtgcatgctgcttaacttgctcagctcagtaccgctcatcagttcatcagctcacgatggaatgggtcctacgacagctagccagcgcgctgctcatgccgtgtcacctaatgtaatctgaatatctgatcgtatagtagactgtcctcctttaagagcagaccgtcttcagaccagaccgtccggtcatgcccagacgttactcagcatcattcaatcgctatttaaaccgaacctgaaagagccaaaccaactagtagtagcggagatacacaagcagaagggttaagcacacatgttaactttgtcgtggtccgacagtttttttttaccaaattatgtagaaaattaccagtcgaatcttgtttctcaagaaaacaccgaaacatgtcacgtaagatcacgagtgatccggacgcgtggtccatatgtcgagccctaccgctgtatatatccccgtcccctgaaaccaacaaccaccaaagatctttggaaaaaaaaaaaaagattggtgtaaatatatgcgtcgaggacgaagaaaaaatatagagtttttgatactctgtgtgcgacagagaattcgtaacccgtatctctcgccctttttttcttctggaaagtaagtgaaagcgtgacgcctgctaccgcaggccggcggcactccttgaaatggtatacacttgctccaccgcaagcaatcccctgaacctggggtggtcagtgctcgtgaacccgcagtccacagaaacaaacccaaaacgaacgcaatgccgtccgactgccaaataaaatcgtcggccgaggtaactgtctataaccttcctcaaaacgatccagcgacccctcacggccccatgacatagatcggtgcacaagcatgcgtcatggaaaaaaaacaagcatgctcagtaccatatgttccaacttccaagaaaacacacagacattgtcacgtcacaccacacaccgcgagtgcggcggtcctgagtgagaggcgctcgatcactgctcgccaaatcacggtccacggaggccaaagcaagcgagggcgccatcaatccgggcaagcaactaggactctaggaggatcaccgccgggggggcatgcaaaaatctcgccggaaccgaacaaccggcgcaggcgtctggcccgcgcacgtgcccgcggatcgcacggacggtgggcacggcagagcgctgcgcctgcggggccgtgggcgccctcagccgtgaaacgagaatcgcgccggttggggtgtgggggtgggcgagagccgatcgacggtcacgactcacgagggagcaggaggcaggcgaggcgacaggggagggcccgcgtcgagtggggctgacgacggggacacgggggcaagcgcgcgtcgtccgttcggtcgccggccaaagctttgcctctctcttgccggcggtgagaagagaacggtttactgcgcgttttgatctcgtctctccgtcgtcacgagttcccgacccgtgccaggttttttgtggccactgccggccgggcgccggcgtggatcgctgttgccaggtctgacccgcaggccgcggcacgcgagggccgtccaggttcaagcggtaggacgtataggagggaagggagctttgtactcttgcagccattgtcatcttcctttgcaaatctacgttattttttttcttcttcaaacggctcatgtatgcagtctagcacatatccagaattgagggggaaaaaaacttagagctacagtacaacttgcaattcttgcaggctgcagccatgtgaaagtgtctctatgggtgaccggacgtacagtacgactatagaagcacaattctcagtgatctgcgttcagacttgtcatcacaaacaagcgaacaaaaaagtagcagtcgtctctcattttttttttgtgaaacgtgaaaaatgtgtcgaccaattttctacggagtgtgttgttgcagcagcacgtacgtacaaaatgcgaaacgtttctgcgcaggtcggactaatcgactgaatgatatttgagtttcaaattacttcccttggagtacataaaaaaaccattccactaccgtcttaccatatgttaatactccctccgtttctttttatttgtcgctggatagtgtaaaattgcactatccagcgacaaataaaaagaaacggagggagtattaaataggtatatagacgttacaacattccgtacctaggcgaaggtatattttgccatgaaactaaatgacatatagctcgcatactttgcactaagactttgtggttattccctaattgagccaaatcatatggtgctttgcctatatatgataccatgggtgccaatgtagctattcctgttctatctacactggtattaaattatatagaatcagaaatttgagataaccactcatgtgggaaaaaatacctatacatctatatacatgcaacaagcagtaaaatatagctaattgtaggtaaaaattagacaaaactatatatttatagtataaatattatctttctttaggctttccaagatttctgggtctgtcactggacacatgaagcatggtaagaaaataaatatgcttatatataactcaagggagtgtaataaatgaacaacaaataataataaaagtgaagcatcgaaattaaaaaaacggaaaacacttgaaaccataaaatcctcatgggtaaatgtaaatattaaaaaaagctttacagatccaaagtgccaaatcgccttccttctacttcgcgctccctataaataccttgtacttgtaccccgccattcccattcccatcagagaagagataaccacacgtccacacaccacagaccacacgcacggtacagcctctccgcagctgcaggtgcatgctgttctccgacgagaccccaagaactcgccaacctatcccaattcccagccacccttccctctttcaca

SEQ ID NO: 153 - DNA, 3000 bp, Zea mays
ggcaataacataccgattccttcttgctcttttgcttttcctccaagtcttagagcgcccgatccatcgcttcctgcaaaataggcagttccacaaggtgagcacaagaacacgaattttacaccatgagctgatgaatgaaaccgcaaagtaggacaactgaaagcgactgacagctctgcggagatgtactcgatgcgcttcttgacgttggccttggcctcagcgaggtcctgcttgaccagcaccggtccgatgagcttgtacacgttggccccatcgctcagcagttctagctcctgcaggcagccgcatccacgaatcgaataaggcactcacggcgaagagaataactgggcgtcagtgatgaggacgataatggggcggcggccctcttgaacctagatggatggcgttcctgcgggtgcctcgggcgggtgccagcacggcggggacagggccgggcgagagaagcgggaggacgcccacgactgcgatgctgtggaggggagggacgatgcttgcgcgagcccgcagctgtgatggggggcgagggatgcgtcttaggaggcgagagaagctgcgatgctgggggagggacgggtttggcggcggaaaaaaggcgaacatgattgcgatgggtgggctacgcggagcttgaggcgcggcgggggattcgcggagcgtgagggcgtgcgggtgacggctggtttcgcagcggaggagacggagcggcggatgggattcgtagacgggggcagtctacactgcccccttaatagttagtacagatactgactgcgtgtcagacgggagggcatatataaacacgaatgactgcaacaattgaacaatgatttcgccgggcgggccgcgtcattttgctggcgttgcagcggtgacgatggcatccgcatcacacatccgacgtactaaaccatccggttttcctctccgtatatacgatggctcagcagaacaatgtcttatacaactcctatctttgagtgtgtgcatgtgacaaagagcttgacgagagcatctttgtgaagtacgacaagcaagaagatgcccattgaaatgatctcaaactatctttatgagatgcttcatacgagtaattttttcatgacttctctgttccttcaaaggatcagtttcccgcgtcacgtacgtgcgacttcacacgtagatctattcattttcaccgcttctcgcctaccaatggtcattacatcaagaatgagccgttacatcatcatagattggtcataagaaagcactacgacagaaagccacatacaacgcagtgctttcacatagtactgcctcactaactgaagaaggacgagcgactgactgagctataaaaaagggtgaagttctttttcaactcatatctttctcgacatattggctaagataaaatgtaatatttgttattataatttcacattaaatttattattttataggtatcaaatatcattgtgtgtcgttattgtagtatagtcttgcattaaaaaagaggtcctccgcttctccgtccatcgatcggtatgacatagtcctatacaataatagcctaacctcgtgcaccacatcatcatttttgcctccaataattataaatggttgagattagtcgtccgcttatggtcaaatatcctaagtgaccaatgccatttccgttcacatgcggctcgtcaacagcagcatgtacattttcgacgacagcgaggaactaccaaacaccatgcatatatatgtgtggattctattattatgctatgtatcattattatcgtatataaagatattttccagagtttgtggctattatgtacatgctgatcggacaatggtgatatggttggaacagatcgagacaccaccaatgagaaggctccacgtggataataataaatggaagcgatgtcagtttgcgtgctcatgaacatgagtggctggggttgactgacgactattgctgagaatatggaacgggtttttttagccactacgagcacggctcaaaaaacaggagcccaaaacatggaccggcacgaaataatatggatcggactaccacggcccgtagacgggcttagaccgggctttaaatttcggcccatctggccccaacacggcccgcacatatgggccaagcttgggccggcacggcccattgaaactcaagttgtttaattactttaatttggtaagctaccgactttatattgttgtgatatttagagtttatgtggtcaaatgatgctagaattgtttaatatctttaatttagtaagttatgtactttatgtggttgtaatattttgattttatgtggtcaaatatatgggtcgggcttggactggcacggcccaataaaggtacgacgtagtttagggtcaggctagaccactgtttgtacatttcggactggcacgccacgattcaaaattgtttgggcttttttggcccgaatccatttttttaggaaacattcggtagcggctctaccgtttcattatagtagaatagaagattgtgcaaataaaaaaagataaggggaggggatattatagttgattggatacaaggatatggattttagagttgttgtggaagccaaccgaaatgagcagatcttctcttggatttgtgaggctagcacgtgaaagacttgttccttgtactgaaaaaccctacgacatcactcttttcaaatattccatagagtgtaaatcatcacttgcagttgaagtgcgttccgcgccgaccggaccaatgcctgccaccaatgcgatattccatgtggaacttgtgacgttagattaagatggaaacaatttacaattgttgccagcaacggagggcgtaaattcccagcactactaacgactgggcctataaaatgggaagccctctcgtctcctgcatgctctgcaaacgagcttctcttgtcactcatcagcacggttagtatagctagccacc

SEQ ID NO: 154 - DNA, 3000 bp, Zea mays
aatttttttccgagggagggtcaaaaaagcaaaaaattcggtatcggaacacggtctaagtacctacttaccagcagcagcagctgctactactactactataggtcgacgactcgtttactttttttcttcccggtcgcgcgcggtcggtgcatccgtgcatgcgagcccggcgcgcggctcctgctagcgactagcagcttgtttaaataatcgatcaacggcaaccatgcgttggcgctgcatgcatttggtatcgtcgatccgtacgtgattcgcggtgaacatatgctgagccgccgtacgcgcgcgtgcctcacgagagaagccggccggcgtgatgaactgcatgttaccccgactgcatgcatatgcgcgcggtgaggcgtgttaactttgtcataagctaatcattagcagttaatgatggtagagcatcttcattaatagctccctggtaggtaggtcactgtggcctgccggccgggtcctttccacacgatagaatctcattttttatttgtatagtacattgaaacttggaagagaaaccactagcgtgcagttcttcccacgcacctcatccatcaaaccatcaccttggttaccaataccagcacctgattgtttgccaaacaccgtatgctgcatgcatgtataccctcgatctaatggcaaggacggtaccggcacggattagtttatttagccacaccttggggtcgtttgaccaagcagattctccccccgccggcctctaaagattagcaacaaattcgaaatcgtgcgtgtccagcgccggcgccggatcgtgctcctgcctcctgcatgcatgaccgtccgtcgtcgaccaccccgtacccacgcggatcgttcattgagttcaggtacctggcatcaactgcatgcatgctggcctattgagttccagcagcgaagagctctgtttccagtcgttgcatctatatacgtacactctctagtacgtacgacgttatataatatataatggatcaggtcttgagctggagttgttcgcgcggaagtagtgacgtcgtctttccactcccagaatccagatctgtaaatcaaatctggcggtcagttgacttggctgccccagcagctaggccgcgcgcttgcccactgaccagtgccccactggctagctgaaatgtactcggtacttggtggtgagggccggtcctaacattttaggggtcctgactcctgagcgaaaactaatttataggcccctctcatctctatatatgtgtgtgtctatatatatatatatatattatatatctaatatatatttatatataaagttttcgaaaacatgattgttggtcacaaatagttttttcaataattttagttttaaaaagtttttgcggcagatggagcagtcactaagatacgataggcaatagagacattaagataacaatccacctctacgaaattctcgaaaattcatgtagcaaacaatacaccattcaaaaatcttcttggccttttactcacttggtgccaaagtaaaataagagtttaggataaaagttttgactttaaaatcctatatagaatatatcaatgaacaatcattagttcgtgagattgcaaaaatacacacatataacatataatataagaactagtacactatacactacggctatagtcatctatcgaatacgcactcagggtgtcgccacgtcgtgttaggagtctgtgacgatttattttctctgtgacagtaataggcttgtcggttcgtttcttaggtttccaacaagctacatctagcgaacagactatcaaatagtgtttgatccaagactaattactaaatatttatagcacacatcatatacttaatacatatttaggggccccataacttcgggggcccagggcggccgcccaccctgcccacccccagggccggccctgttggtggtaaggacctttttttttcgaggcacatgatgtcggtctagtcatcagattgactataattagagcgtgtggtttatgatattttgttgttttaagctgtgtgatgtttaagcgaaagacgttttaagagattgtatcacatacttgaaactacaaataaaatcttcctttgtcagaaaaaataaacacgcggtgcccccgcgaggaacagtggccatcaacaaatgctacggactcaggaattaatttgtgcaagaaatggtgcagagatggatttatttcttcacaggaagaatatagagagacagaaaaaaaacgtgcaatgatccttgctttccaaagggctaccgcggaaagggacgcgtagctgtgtgaagtcaagtgtgccaaggctcccgctgcgacgttcttctatttaataaaccagctaaaagggaagcgaagcacgcaattagaccgcctaataactgtggtctgtggagtaagcaccgcgatacacagtagtcccactcccaccactaccacggcggaatggggttcggctgtccgcagagcagaacagagcgttgaagtgaagaaaaagaggcgcgcagcacagggcgaaaaagagagagacgatgccgtattgacattgcaacaagcaacgagaagggcggctttgtcaggcgcggaggccagagagcagcagacagagagaaagagagagagagagagagagttgggtgcagtgcagcagtgcagagagcagagacggagcggagcgaccgagagagagagagaggggaagtttaataatatatcccatcactcacacgccacggcatcattcgccgcctccttcctcctcccgctcgtcgccgttcctcctccgagcaccagcagcgcgccccctccgctctcccttagctcaccagccgcctcttcgtcggagcagcaacagcagctgtgcatgggagtgggagcacggctctgagaggaaaaagggaagaagaaaggtgaccaaagggaaacaaagggaaccaaaggactaggagg

SEQ ID NO: 155 - DNA, 3000 bp, Zea mays
gcttcgggctatcataaaaggcagattttgcttccctacgcatgtcgcgtatgcgatcgttaatgtacgaatcaacgagccgagatccacaacgcatcttctgtcccattattctcttcgactctattgtgcgcatcacctctcctttgtcgtcgtaactctcccaactgcatttcctcgtctcctacaaaaaatatagtaagtaccgctataacattacatctggtgcaaaaaaaataccaacctcatcgtaatcgaccatatgtccacaaaaatatccaacaccaagctccgaaggaactaatccatacttagcttcaataccacatttgcagagtactggatcaaatttgacctcttctgccgcccaccccatgtatctcttttcctttacctctggctctggccaatgggacaaaggaccatacaaccactctctgaaacgacacttacgccacccgtatggctgcaagagaaaaaattagtaatttattgtaaataaaaactagttcatacatttagcatatcaatgggctcacataatcaatgttcggacaacagaactgcttgtcatagtcttcgtcgatgacagcacggtctccacaatcgcatcgaggcggtgagtccatccgtctttctgttgctacctccttctccgcatccgtcattggtggaggattcgggggaggaggtacccaacgcttaaaacgctcatgactggtccttccactcaaccaattaacgaaaagaagatatcgagggtcaaatttatcaggaccatcgatccactggaaaaagaaacacctctgatgtccctaaaataatggaaagatgcactattacatatctacaaaataatgaacgcgaacaaaattaagtgacaagtcataagctacgtacgtccaaagtgccacaaaggtagtagcagcgagcagccgtgtctgatgtgtgatgatgtaccagcagtctgccacagtcacagttaggcacgggagttcaggaggaacaggagcatccttactagatacgtccggatataactcccgaggacgacctctcttctgccacaacgcctctcggtacatgtctttcatctaataaacgattataattatcacttgtacctattatgctttataataagtttacacaaactaataatcgaaatgataatataataggtgtatacaaattattaaactaacaacctaatatacaaaaggaatcagttggaaatcataccttggtctacgaagtgaaccaactcaaatctttgaatccaggaaatttttacgaagtttggaaatgggatgaaatgagctgctctcggccagccgcgcgggcgtttttataggaatttgtagctcggcgccaagatctgtggcgccgagctacgaggccgcgccgccgccacgtcagagccaggtcagccctggacgcagctagccgttgcggccacgtcacagctcggcgccataggctgtggcgccgagctgtgttagctcggcgccacaacctatggcgccgagcttaaaggtcaaaactgcatttaaaatttttttagatctaaacgtgaatttacttctgtttaagggctaaaatacaaaaaattcggcctctcccactcccggaaacaaaaggcaacgctagcccagcgagacgggggagtgccctgcttcgcaaatcgctctccaggccccgctcaaacgccgttaagccaaggccgtgatgatctttccctccgaaccgcgggccccagcactccccggccgcacaccggctccccaagcccaccccagtccaccgacgtgcgggtccatgcgacacctcagaccccaccggccagtgacgtagccacgacgggcccgcgcgcgccgctccacgtgggcccctgtcgatctgaggattcggggcgagcccagggagcacgcggctttagatctcgtcggatctcggacacggcgtggggcccgccccactccctgcccacctccacttgctccacgtcacggcgagcgcttcccctcccccctggttatctatcgcatcctccgcggccctcctccctcccactcctgtcctctcctctcctctccccgccatttggctccgaaccctcacaacagtgcatcgtctctcctgtccccgccatttggttcggaactctcgcggcctcaactcctcctcgtcatcgtaacacccacgcttaggtgcgcaccgcgccctctgctgcggctacgggagctagctcgtgaattcaactcttttttcatatttttttaattcatttagctgcctttttctgtgttgtttctgcggcagagttcgtgagggtcgcccccaggggatctcgagacgtccgtttccaagagtggaccggctcgcaggcgctgctgttaccttgggtggaggcaagttggaattgcgatgtttgtttgcttcacagcctttttccttctaaagttttgctctgacgaggtctacttatccttttgctctatatttagctcggacctgcggatcagttggattctcaagggagacggtggtttctgatttcctttctctaagcataccaaatcctttgtctcgtactgcctcaaatctctattgtcggttttgtatgcggggaacttcgtacacgatccttatcatatgagctgttttaatgtttcgcaggagtcgggagcaactggttttgggcgtcgcggagcacatggcttaagaataatttcttccagcccggcgacaagtgagcctcgctacaattagtcctctctcgctctcaccgatactgcagaatggagtagcttattctgagcatctgttatgctcatgacagatcggtgtttgattcctgtgtgttttccctgcagattcgcagttggattcagcatatgcattttttatgctgacataggatgtgctcaaccatccgtggactccctctagttgcacaaaccacctcagtgctctctctttcttcgaatcgggctaata

SEQ ID NO: 156 - DNA, 3000 bp, Zea mays
cacagtgtaaatctgaaagcacccctgaacctgcttttagtggcttttcggatggaactgtgaaaacatatatcgaagaacttttaacgacttttagtggtttccaccaaacggtttttagctttttaacggctcacagcctacagcagctttttccacagctcacagcccacagcaacttttttcacagccacagcccaaccaaacagaccctaagtcgcatggctgctgatggccggcatgcggtccgagagatggccgaagcaaagctagtcatcaagccagaaggtagtgtcacgaccattaccaagacaaacaattgtgattgcatagtataaaggaaacaagttcttaagctatccccagtgattaccagttggcttgacaacgacattagattggaaccagacgacaagggggagtccaggggttggtgtaactcgtgaacgagccggaggagtaagtaggtgttttgtattttgagatcacatacgcccaaaccaccatgacttttctcactatagactttattccaagacacaaggcaatgcaatatggtgaccttatccccccagactagaggaaggaatgtcgacgcttgtccacaacatcgaccaccccatgggggaatcagggaggcgcacatggcaaagatgagttgattgttgaggactgaattcactagatcacagcgcccaacattattaagtagcaatgccttccatccagataggaacatgtttgtttttgtgagcagggggcaagggcatggatgttaagcttttttgcagaaagagaaggccaaggtacgacaatggaaaactgctgagcttgcagtgaagaatcgaggtaaaggtttcaatagtggtgggtgccacatggatcgggacaatggtacttttgtggtagtttatgtgtatacctatcgagttagagaaggcatcaagcgcagagcgtagctgggcgaccccagcagtggaggctttggcgatgatcaatgtgtcatcaacatactgaaccacgggggcaagagcaccatcagcaaggggtgcagcacggttgggtagcttttgatgatcaagtgaaggaggttggccacaatcaagaagtggtatgggaagaggggatctccttgtctgagatcggtcttgcactggatccaggggcccggacaaccatgcggcagcactgccgaccgggaggaagtgaggagggagttaacccaggcgcaccatttggcagggaaacctcgagcatccattatgcgcagaagagtaggccaactaactgtgtcaaatgccttagcgaagtccaactgaacaataagagcaggcgtaatccttttgtggcaagtttggatcaactcggctgcataggcaaagttttcatatattaatcttccacgaatgaaccccgacttattttggtcaattatgttggcaattttcttttgaagcctaggcgtcagcattttggacatgatcttgatgccagcgtggaatttcgaggcgaggtggagcacataagatgatgtgtggccaggtagcagtgtagaaggctaagtcattaatgattgtgttgatatcaatcttatctaattttttttctcgatacataaggtggccaaaccattcaatcatttttttgagagacggtagacctcaaaatagttcttcaattatttttaacatcgaaaaactcctttcggttgatgccaccatgacaagtatattaaataagattcgataagctataaaaacatgattggaatccatcttattgatgtactcaaatttatccataaaagatatgggtggttctagcaagtttagcttcaaaactcttaactcaaacattagattatttagttaaacattagctatcctgttagctatataataaaatgcaggaggtgggcccccctaggatttgggggcctagggtggccgccagggggagccctatgcctagaatcggctctaagcatgcaggtagatcgaaaaataattcatctcatgaaaatagatgcgttaaatgcatgagtgacatttggatttattgaaggatgtcacctaggttcacgagctttaaaattgcatttctatgttcttaaatttattaagtggaccacactacagtccagtaataaacttgtgacacactatttttataaatttagggatgcgaaaacctagaaatgcatttttaaagtttgtagacctaagtgacatgctttgacaagtttaggagccgccgatgcatttaactcaaattagattacatataaactaattatgagctggtaaggactaatagactctaaccatcaattaaccaccatagtttttattatattaagctttgtaattagcgtttcaaaatacaggttttttgttagcctcatatatgaaacatgccctcatttaagtcttgtatttttgtggtggctggtcctaggtgttctgagacgcgacctctgatcaaatgggcgcgcaacaggtcaccgcagaggacgtctggcatttgggctggtggtacaaaaaaaaatctatcaaagcctgagaggccgtagcacaaccaccttccctgccctgccctcagtgccctgtcaaggatattttaggcaatgcgttgcccaattccacaggccacgtcacacgtggtgcggctctaaccgtatcgtccctgcccggtggggccgcggtcgcgtagcagacaccgacgggccgtcacgggccctgctcgccgcagacgatccaggggccaggcggcgcgcgggtgatctcgccacggcgcgttttgtgtggcccgcccgtgacgggaggcggaagagggaagaggcgacgcgacgcggctctataaaaccgcgcctccaaccagtactcccccggcaccctagagagattctgttttcgcaccagcgccggcacaggcaacgcagcaccgcaccgagccgagccacttagcgagcgagggaacagcctccacggcgaggagaga

SEQ ID NO: 157 - DNA, 3000 bp, Zea mays
acgttgaaaccacttgagatccccaatttcattaattagtgtgctctaacgtgacacgacatgttattattagtgtgtactcttgggttttatttacaaactcagctttaaataggttttgcatgggttgagaaagttcgaaatcatgtttgcccagctttctaagttcggaggtaagtgacacatcgtggcaagttattcatggactgctactcaagtatcccattacatatatcacacgttgattattggaatcgcatacggttttattcgcgtcgctgtgtttcattctcttgctcacttgaattgttgctcgattaataattcatttattcccgcaccatcttactcgtaccaaatcaaaactagtaacatcccaaatgttaatatagtatgtactagcagagattctagtgttactgaatcgaatattctgcggcggctgatttaatttctaccggttttaatttgatcaccgcgcatttacttctgtgacattattatatgcatgtactagcttaattagtcttagcgctttggatgtgtggcagccagagacgaaattaacagcccctgatttttcctgaaaagggagcgagagccgagagagggagagtgagagtgagagggcctataacacaaataagcgtaacaatttattaccgagttgcatacggcggcggtacggacagtagaaaaaaaagatgggcaaatgcatacgtacgtactgaattttgtaccacgactcgcgcgcgggcactgacaaataaaggatccgaatcggtggtgtcagtgtcacatgcgatgcgagtggtctagcgcatgtggtcctcgcctcggtattccctcttgccgtgtttgcatgtgcacggtcgcacgtgtaggtacccagccttggtaagaaaatacttctacggagagtactaccgtattgcagagctgccttttcgaaacagagagtataataaattaacgcgttggtggcaagctgagtgctgacaacgccttttctatggagccttggtaatatatgcactcgcttttgctccggtaatgtcagccaaatatacactaaactactatagctgagtgctgacaacgcctgatgtgacacggttccatttaggggtatttggttacaccccgctaaaatttagctcatgtctcatcgaatgtttaaacctccgttccgggtattaaatgtagtcggattataaaactaatttgtcagccgaagattaaaagacgagacgaatctagtccagttggttgggtctatatttcatactcctatttaaaagttaaacacttgatgtgatccgggctaaactttagccggagcaaccaaacacccccttatatggaacattagaattggtggggaaaacctacaagtcaaaggaagtggtcgtttttaccatgacgaggagaaacgcgtgactctttttttttgcctcacgccggttgccgcgaaccatttgtcgaaccttccattccgagtttccgactcgacgaccgcgacaaatcgatattcggccaagttttcgtcaaagcaaccaaaattcgcgcgaacgccgaaaggggaggaggtggtggtaatggtatatccaaaatccgacagtgaggtttcttgcttcgcattcgacaagcgtacgtacgtggttcgttgaatctggacgcgttttgtttctctctccctccccccaaaaccgtgtccaggtccattccaaagggccggtaaatatactttggacaactcggaagtcgtgtcctattggcgccacgaggacaggagtggagaacagaagtggcagagtcgccgcagctctggtttcgtgacaaccaagaatcctgtccagtggatcccatggaacaagctggtctggcatggtcacacacagttctccatggtccgtgctcgtttccgaaagcaaagactttgaattgggtcactgcgcgtgggccctgtcgcacgcggagcccacgcggcagtggcccatgcagtactgcaggggatcccgatccactagtagtatgccctgtttgtttcttcgatgtactcattgctgacgattatattcattggaatttctaaccgaagatttccaaccgtagcccgttcctgggtgctgttggtcagttaggctaacgcatctgcacacgcacaaaacaccaatgcgttacaacaaatcctaaaaaaaatagcagtgtgcatatatttgtagaacaaatcaggtcgaaagagtttgtagccaaacagagaagatacacgagtcggttggcctggaacggtcctgtacatccagatatatttggccgggattgaaaccgaaaataaccagaggcaaccggtaatagttgttcggatatgtctaactcagaatgaaacaagaatgaaaacatatcatttcagtcgtttttaccccctcagtgactcagattggatccacatctaaaacctcctagaatcaaaccaaaggaggccttctcacgttctggcggcgaaccaccatgattcactcgatccggacatggaagaaaaacatacctgttttcgagttggaacaaacgaacttaacgttataactttgttcggttacatcgaaggggagtgaagaggcccagagggggatcggagtcggagtggaaggggacaacccaacccgtgcctgactgccgttggccgttgccataccataggctatagcggctagcccatgacccttgtaaaaaaatactcctagtaatagcaaaacaaaaatcaggggcgaaaaggcgaaaaaacaattaattttccgagggaaaaccgcccggatcgctttaaatagcgccctcgcctcacagccctcccccattcctctccgccccctcccaccccaccccaccccacccgcaagcgaggcagcctaggacgcagcagcgcacccccgatcctcgcctgtcgcctccatctccattcgcaggcctgagaccctcgcccgcaccgcgctgccgccagcc

SEQ ID NO: 158 - DNA, 3000 bp, Zea mays
tagcctcaagtaaaaagatataaaagatacatcttacttttgttgtttgctcgatgtcatgacttggagctatatatttgggcagaacgaagagttgtgcattactatcctcatgtattgttgactcgacatttggctcgtggatgtggtgtacagctccgccatcagatggactgtattgtttgtcatcttcgttggagtgcttgagtagctgagattcacttagagatggcaatgagcgccgatcccgatttctcgtagggaattcctctattagagctaatcctcttcttattcaattttaaataagaagtgtattctagcccctacaatcatctccggttttgtgccttccaaaatagtccttagaggatgtggatgagaaagtttcttcctcaaggaaatctaaacggaggaaaatcttcccccggtaggtaaacggggatatggaccgggaagcattcctcatcctcgctccccgcgggacccgttaaacctgaacgtgacaaagttttcatgtattagttaatgataaaaataaataattattttgtctatagatcactcatttatataaatatgcttattttaatgtatatataatgatttcttacatataacaatatgtataagtgaaaatgttttgcattagtaataaataatgtatgttctaattataatttaaacgaggatggcgatccttgtcggggatttatctcgaaacagggatggagaaaaatatggcccgcaaacgttcgtgagaatctttataggaaaaattttatgtcgcatgaacatgcataaaaagctattccctgacggtaaattcctcgttgtcatcggaccgctgagtcatattttgattctatacaaggtcatattcgcttagctctagatcccatactgtccccatgcgtattttggcttatttctttttgtgtgtagtttattatcaattcgtttagttgtacttctattttagtaccacggacgctcgttttgtttcgcataaatatagtactctctttgttcttttctatttatcattgttttgtttaaaaataaatttatggacgataaatgtttgaggaagagtgtagtaataagcaataggtccgattctattgttacagcatcgagatactacttatctctactatacttaaagcatcagtttcaacggtcgttctatgtcatatttttacaaataatccctcacatctatctcaaattaaccatgcatccttccatgcacacaacttccacgtctggcccgttaccagtcgggtggttaaattagcgtaaaatatttataaaatgtggtgttcgaacctaagccctaatggaagaagggcgggagacactaagtggagtcgtctaaccagtagaacatcatggtcaattgtttttgatattgaatataaattttacatatatacgagttttgtaaaataaataaaaatataatcgtgtcaggccggatcagcactacgggccgaggctacagcccaaacatgacacgacgatcgtgtcgggctggcccaggaactattaaatggtccgtgccccagaccagcccgccaggcacgacccatttgtccatctataccttcgcacgataatgatggtgctcacctcagttgccgccacctcgttcgtcattctgcttattttctctctcccctcatgccttcgcctccgtgccacgcattctcggcagacggcgtgggagcaggcgtctcctctccgtattagtccgacaccagccccgacaccgacccgcgcagtggctattgcacgtccacgagggtgtttcatagcatgcacgcaccatcgttttcgctgtcgtcggacgtcccgttcgtcttcttggccttcgcccttttctttctccccaacctgctgcccctgcctacggtcgcagccgtgagccgaccgacgctcgtcaacgcgggtacgggcaagtcaatcttgctcctaacttttcttcgtgcgtgttgccgaggaggacacgacggtgcctgccacacttaggttatcttggcgatgacgagtccagatctgagatattggacaatcaaagcctgtagcgcggcagtagtcgacatatgctacggagttggtggtggtgttgtgtcgcctcggcggatccagggctggaaggcactcgcattctctcgcctttttcggactgacgcctggtgcgggtgcctctcggtttggagttgccctgattgggcttctttctccgcttgtgtgctgtctccatgtatgtatctagcggtatattacctatgtcgcctccagatgtccatgtcttcgtcgtgtccttctccggcaacgaacatgtatgactgcctctttccttcccttcctggtctacgaaactttggaagtgggagaggcgatggatgaggtccctgatttgctacctatggtacccattcgatggtttgacatcgcctgtctacatgaccttttctttaccacgatgtcgactcgcttagtcaaataaaaaaaattatgcagaaagcagagacaatcaataaaaatctttagatctttttggtgcatagtttacgtgggtattgttatgagttgttgcaacgcacgggcaaccgaatagtaacagattaaaacgaaacaaaacacacacaagtgcgtgtaccgttaagtatatcaaggctcgtttgatttgatatttttatttctttatcatgccctttttcaacatatgaaacgtagcgctccaaaatccatctatatacatgcgccttttgcaggggtagtctatatgacaaggatcagccaccacttctatgattagtagtactatctccctagatcctcgagctagcgctaggcctatatatatgcaaggtcagaagcacttctttctagcacaccaatttggtgagcagattgcgctgctccataattacttgtgctctaagctttgatccaaatccacacacattgatctaaaggccaggttgcaga

SEQ ID NO: 159 - DNA, 3000 bp, Zea mays
atcggatctttgcatcctttctatggcaccatacatgaatcgatattttggctgcaaatttttaatcatgttagttttagcattttttcatatccatgtgttaagtttgaatcatgtgttgtttttatataatttattgaaaatatagatcctaaacttcactaatacttacaacaatagcatcatcatgtgttttaatccacgccacaacactcaaggcattgaattttcttctaccaaagagttgtatgtgtgtattgttctttaaaaaatagagtgattataattaaactaccagtattcatatgtaaaatgtatagacatctaaaataaaatttgcaaaaaacattgttgcagactttcaatataattaagaatgggttttagggtcatgatatatggtttgttaaagaaacttgtttttttttgcaattgataaactataaaatacattttcactattgtgtgcatatgtacttggtatacatagtggcatatatcatttttgtttactttgaggtttgaattatctatgttaaaattggataacatagatacattggtgtgcgtcctttggcccatttacttgactgaggagcaatactataaagtaaaacatatttggatattttatcttaaactcctagcataatattgatttaattatgaacaaatatatgtttaggtgatagtttcatgggtggtaaactatataagaaggcttaccatgatctttgcaaactctaggctatgaaagagttccatgatttgtcttagaagcatagacaaaacagtgataatgatctaaatcacacttatggcactgatgaccatatatgcaaagctaaatgcatgttaagttgtattatatcatatgtttacaatgactatcgcatataacgaggaatacattgtctatatagatagctattactgtagtagtgccaaatgttggacaacatgaatcataatcttcaaacctagagaaattgtagtcagtcgtacacatatcgtctagtaagttgtctatactttttatttattgtatcaaattttattgttatcttgcttgcttgtttgtttgtaccatagacacaatatggtcaaaaagtggtcaatcgattcgaagaagattgcaattgacgagtgctaacagttgatccttttgttgtgcacgctagcggagtagcatgaaaagagtaaaatatgaaattagcgttctaaactgtttgtgctataggtacttcgtatttaatggagtgactaactataggaaggtgagagctcagaagtcagcaccctcacacagagttctagagttagtggtcatcgaaccacgacaaactacatgatgagcagaagaggcaacatcaagactatgatcaatagtttcgggtcaatgaatgacatcgtgatgagtatttatctaactatatagaacaacaacacatgatgttttaagtaagttcaactgatcttctattgctatctttaagtatttaacgtagcgaataatgttttatctatttcattcataaataatgttgtgacaaaaggggataaccatcacttttaccatgttctagataccacaaccatctccaccatcataatgggttcttcattggtgcttggacctcaaataatcatatctatagccaacttagctcaattctaataaaattaggcaacttggcttcattgtagcaaaaatagccaacttagctcaattttatctaaacttagctaatctagcacaacttagatcaatattaggaaaaactaatcaatctaatctagctcaactatagcgaaagatagatattgtagcataacttagtagatctatctcaaattttagcaaaaactaatcaatttagataaactctataaaattttaatcattatgacttatttccaactaattgtaacttgcatgatttttatgttccttctttataattagcaacacctaaagacacgaatgatgaggggtctaacgcattcattaaccagttgttaaataatactctaggtagatgataagaactctaattattctatgaatctaagctaaaagatgtttaatatttaagtattggtgtttattatgttatttagaacgattcatgttacttaaagatttgttatgatttttaaatatgattatgataatttatgtggtgtggattaacttgtgaacatatgtgatgtagatgaatatgtatgttgtggatggaaccatatgaaatatatatacacactcatatactattcgttggtgtaggtaaagcttcatccatcggtaattactaaatggtcttcagtcattaccactaggtgaagcttcacacgaccgataattattgaagaacgctcattaatttccggtaatggcttattggccttcactagtcggtgaaaattagctatttttataccaataaaaattagctaatatatgtaaaccaggtctaatttttatgggcctcttaccgaccaaaattgattagattattgttacaatagttttagtcaaaagctagctatgctataaaaattttgaattaaagtgagtttcgtaataaaaattgcatacttttaaaataaaataattaaaaaacagtttttagaaatacaatcaaacaccttatgctataaaaaaattgtaatgtacctacaaatatataatactttactttaaaataggcctgtgccttctcggctctatatgggctgcctccaacgaagcgccatggccatgggctccactgtgtcgggtcccacatgaggccgcgcctccctccaaatgttccctccctgccttcgtctttgtcgttgctcgcaaactccctgtcctcccctgttacaaatacccccacccgcccggacagcttccctgcatacttgcagctcgcacatctcatggtgtcgcaggaacgacaagagccagctgtgcctagcagcagcagcagcagcgccaagcgcgcagccacgtcc

SEQ ID NO: 160 - DNA, 3000 bp, Zea mays
cttaaaagacttcgacaggtgcagccactgaaagtctgaaagcacggagactctgaacactgcggtcttgcgtggagtgagtgtctcgaagacagcagcttatatatagctcaggggtctaaagaaacagacacaggaaaagccagaaagaaatggactgaaaaaagtctaagcctcagaaaacagaaacaaaaaatgggaaaagagtttcaaaaatagaatggagatgcggggtatcgatccccgtacctctcgcatgctaagcgagcgctctaccatctgagctacatccccacatgtgatgtgtcaatgactggctgcttatttatgtgtttgatgatgcaggctgctactgctttagctgattgattgtgcacttgtgcagaaaatcctgatcgatgctcgtcagttcatagcacgttcagatgcaggagcgcacctagcgacggctagcgcggtcagcaagcgtatctggctgaacgccctcagaccagcagcatatttatccgcgtcagcatacatgattcttaacacacgtcgcatgtaaaccatgtaatgcagtgcgtctgcccccaacgactcaatcttattgaaatccaaagtcccaattttttcaggcatgtttacaacattattataaaaaagcaatgttagaaagggagttgttgaacaccagatttggcacatgagcgtggctgtatggtctggacatgtggttcggacggtctatggtgtagtttggatggtccataattatattaaattaggccagaataattatcccgcgtgtgcttatccagctactcacatggaaacctgttaggatgtgcttagtaataagttcacacctccctctataaatataaagggctttggtcgattgaggcatgactcaatcgatccaattaattcattacgagttcctttatattcatgccttaggagtagcaataattcttccatatcctcaatattcacatctcctcggctcgacgttgtttagagacaccttgggtattctgccgacctcaagaaccctatgatcttttctacctcgcagggtctcttcctggggcaaaatccaaattatacaggagaccagagacgcccacaaccacgaccatgtaccttcaagccccaacgactcaaaatatgtacatgaaaaaacacatctaaggcatttggtcggctaatcaaagtcggtcctacctttaatcaattaccagctaaatatgtcaattaaaaagtcattcatcgcaaccggccaataaagtaacctcattctcctccactaaaaaggcaggcaaaatagacaaactcatcacaagaggtgaggccgaataagtcgactcgagatatcgtacagttggttccaaacacacaatcaacaccaccatggacgcctccatctaattacgcacctatatacccgtcaatttatccctccttatgcatttaaatattcacctccaccatatgcgttcaactagatgtgaggagcacctatattctatgcacaatatccctacaggatgccataacacccatcatgagggtatcccaaacttcagtgcttgatcgattaagagatcctcgatctggtcccagacataggttcagcaagcataccagaatcctcgctggcaaaggccgaccaatacgacatggggcataaagaggaaactcccgcatttcaagtgcctgagttatcggtctccgattgtaaaaaaaaactagagaggactacagtcattgatgttattaaggtgggcaccacagatgtcattatcaatgctaacgatgaagggtcgatgaccttttgagaaacggtcaaggggaaggaacagtggtggatccacctcctcaacggggtgggcatgcgtccggcctatttgcaacagagtagaaaaaatggccaaaacgacttgtgtgcctcgacagtcagcatgtatactatgtacttcacgtcagggaactggataggttttcacgtgttgatctaaataggttcctaggaatctaggcgtagctaacttgtcaatttctctcgctgtttgtgcttaattatgtttgcaattgcaagtttccacttgaatacatgttccttttgcactgttccggtgaatgtgcaatagatgaaatgcaaaccatatacgcaagtcttctactctgaccattattttatatatttatattgtatggtctctttttatgaattataatatactatgtatcggtaaagtttgaaatgcaaaccattcaattttttctacttttgtgaatatctttagaagtattatcgttatcttttccatcattttaagtgtttgcatatgtattaactaatgtatcaaaaaaatggcatccacgaataaatttatgcatctatttatatattcgttgtttataaactagcacatgctctctataaatcaaggaagttgtcatatatagctagtgataataaagccggtagcaaagtgcctgacccaagtattcatgttcatgctaaaaacaaaaataagaatttacagagtaaatattatattttatttatttacaattataaaaatattgaaaattttatcatccaataagtgtccggatctatttctgaccggcgggtaccccgcatatcagcgacccagcagccgacgcaaaatatctgcgctctggaaccttcaggaaccagctggtacctccaaaggccgacacgcgctcttcaaccgaacccaacagaaacaggtcaggtctcataaaacttccccaagttggatttcacagccgtgtcagaccacccgactgcccccgcctagtttagggcccacagatcagagacaggaggagacagctccggaatcttctagaacgttcaccgcactagcctctcctgatcatatatacccgccaccattcaatccgccgaaaaacacacccagattctttcgattctttcacggttccacccctcccctccctcatcgccgctgcctactcccc

SEQ ID NO: 161 - DNA, 3000 bp, Zea mays
accctgatggtccggccatgtacggtgcgacctgggcggtttgtgtgcggacttgcatctggtcggacggtccggcgaaatacgccggacggtctgcggtataaccggactgtctgagatgatgctcggacggtccggccgcgtcctgtactttccgcgtgcctagtagttgtggctgtgatggtggcacgaaagcgtgcattggcataccatatgatggctgggtcaagggtgacccatttatagccgatgtgtttgacgcgggtggctctgtattagactcttgcgatggaaagataggagcagctgatttctcgtatgaacgtagatgcattttaatagattcatctacatattgctttaactgatctcctcgttgatccatgaaagtcataagagatagatctagagtacttatagcgggaccctgaagtggaggtaggagagattccatatcgatctccccttgacgaatgatcttctggtggcgatccaccgtgaagtgtgacaagtacttttctgccgcctccttgtgccgtttggagagtttatgcagcagttccgcctcttccttgtcgcgttgttcgttccattgccgcatcacctccttctcatcgcgcattacgaggtcttcaaagggtctttggtcatcagccgggagcgcctccatggccgacttgatgatgttggtggtggagatcttggtgtgatccttcgaaccggccatctatgggccgatttttagcaggtctagacacctagtccccagcggagtcgccaaaagtatgttgacacctttttcgggcgccaaacactcaacaagaaccggcgatagagctctctgcacaggagcggacggtccgcggccaggggccggacagtccgcgacctggcgcagggctaaggttccctgcctgatgttagaaatatgccctagagataatcatagggatgagcatatttctttgtatccatgatatatatattgcttaattgaatatccatggaaggcaccttgtattgattagcaattatgtgaattgtttgtgagattctttacttatatggttattctaaatgatgtccctagtcagagtcgatgactagcacatgtattagttgatgactacatttcacaagtcatgaacatggagatgttaaactaataatgtgggcacatgtatgacatgaggctggaccgacccaacgtgagatattgtaatatagttctctttttgcaacatgaatactgtatccttagacctgagattgtcgcatgttctcaagatgtgaattgacttacttaggggctatcaaatgctattccgtaactcggtagttataaaggtagttttgggtttgtcaggaagcatgctgtgaggcatggtcagccaagatggaatttgtccctctctttgtgagagagatatctctgggccccttgagtgattggatcaagaaatacatggccgtgctagggttaagagttaaccattgaaaggattccaattcacagtatcgagaaagagaggtcagcttagagccagaccaaatatcgtgagacaaagggaacaacatgtacgtaatgttgcaatggttcgtctgatatgatctttacgtgcgcataggagttgacatgtcttgctagaggccgctgtcaattattgggccaagtaagagtactcgggctatgtctatttgtacgtgaacctatagggtcacacacttaaggggaaggaagcctaactcggactagatccgaaattagactgggctttagggttaccgatgggcctcggtgtcagaagcccaccataacgcctatataatgaggggcgggggcgtggttaggcttaccctaattcgccaccagcaaacgagtagtcgctcgcctctcgccctcgccaagccgccgttgcgaacctagcagttcggtacgcgacgcttcctccctgtacgtgtggatacctcggaggtgctgcatctggagcactaggacgaaccgtgcgaggacgtgaaggacgccgacgactgcatggcactgctcgacgcgttcgtctacatcgagacgtcttccgctgctctgcgcatctagtggtaattccatgacctataaccgcagtagttcttggttttatggggttgaaaattttgttttgcgctagcgtagcctccccgtaatcctacacctgatggtcggacggtccgcgcgtgcgcaggggcggcggaaggtcgccggcggcgcctggatctcgctcccgggagggacccgtcggggaggagagatcctaggagttgtctaggctcggcaggccgacctagactcttctaatcgacgtagagtcgaagagaagcggagaatttgaggattgagaggctaaactagaactactcctaatgcgtaaggtaaaaacgagaaatagatttgatttgatcgattgttgggggtccaatcggccgtagcccttcatctatataaagggggaggtctggatccgcttcgaactgatttccgagtcaatcccacagttttaggtaacaaataccgcgagaaactaggaaatcctaactgactctgcgcatgcgcggaccgtccgcgccaccaccgcggacagtccggaccgcggaccgtacggcctcagggccgtacggtccgcgcagctccttttgacttccaacaccgttcatttcagcaattgcaagcaatacacgcacttgtcagagtaataatggatgcaaaagcatgataagtggcagcaaggcgttcatgcgacgtcggtaggtcgggcagagatatctggatctggatcctacgtggcccaatggtgcgcgggcacgcggatattgcggccaatggagggcggtttttggatacccccatcccagctccgtcgtgcttcttattaatagcagcctcagattctgctcagctctcactcagacgccacctgttcttccttcctctcctctctgcaacgcgtcgggaagcagctgccagcc

SEQ ID NO: 162 - DNA, 2192 bp, Zea mays
gtaagtaccgcatgtccaggattggacggggtgttacaagtgatatcagaaccgaccctcgcgatttcacgggcgtgtgtgggttagggggttcgggtatatggcgcatgtgggcccggagtggtcacatggcatggcatatgacgacactagacacacagacgtggctaagaggggaggttcctgtattggggttgaccgacgaggacgtcggtcttctaagggaatggattgtgataatctggcccctgggatggtgatttccttgtccaagacttaatagaattaataaattatccataccaacaaggtgaatcttctttttcggaagcctatctcgaaaaaacctccaagctaagcgtgcttggcttggagcaatttgggatgggtgaccgaccggaaagttttctctggtgcgcatgagtgaggacaaaatgcacacaaaagactcgtgttggtctgtggggacgatatatgaccctaaagagctgccaggagtaagtaccatcggtccagggattggacgaggtgttacatgaaaactcataatttaatgtaaacagaaatgatattgatgtttgactagtgattgattggcagtacaataacatcaaacaaatagatacagagaggcaacattctattgttgttcggttgctaatggtgtacatttagctacatccggtgttgtttaagattttagaccacttgtcattgaaaagagccgatggttacaatgaccacttgtgctataatttgtcacctaaagacacgaggctttagtttatatactaatgtatattaggcttgtcccatatttatcaaataagaaataaatacgggttcaatgcaaataaaaataggatcatgcaaaaacggatagaataaaccctctactgtttccgtcctgtttccatatttttccataaatgcgaaaatggtcgggtcaaatgtagaaaacggtatgggccaggacgggattttactcgtccgttttcaaccctatgtacgatccctagcacatcatgtctgccttgtggggccagtcaacctcggtcatgggggacttcagcaccggagtcactatagtgatccacgcaccaggaaagacggggcaacacatcatgccactacgacaccatcaaactcgctacagggacctacataccggacagatgacgcagtgcgccacgccggaagtacagctacccacactcgaccctacggaccccgaggatacgcttcagtacccaaggaagcagacctctctctctagaggaaaacataccacctatgtaaagttcccttgaactataaaagggacgcccctctttcttcatacacatgcacaatttgtgacactgtccagccaatactacgatcaacactacactggactagggcgtaagcctaaaccagtataattcatcgtatcccgacgattcaccattcagagtgattatttttaccaaattaatttttatagaagtcgcctgaaaagctgagcgtttgttagtccgcaacagtttttggtggcgagaagctgaaacaaacatggcaaaaatctctcaaatcattggtgtctaaaaactggtgtggtcattcttaagctttcgttagtgactcagtgaaaacaggtggaatcggttgagaaaacatgatatgtttttttgtagaagtttggtccctacactaaactttttggattctttttgttgtgaagaaaaaaatgagtagaagcttggtccctgcactaaacttattttaaggcggaatgtcaaaattaaaatgacatctagaatggattttttagggatctgaaacatgtttttataaaaaaaattctaaaaaatatgaagtcaggtgcgaaagagaaaccagacattcacactggtttgaatctttgtgaagccacagccacccactccaaaaccacaaaagcaacatcgactaccaccccatgtccaagttggtcatttccgcccgagctagctaacccctataaatgcccctcccagctcagcgttcgcctcaccaacagaaaacctcgcagctagcagcaagatcttagcacaaacaccacagcccacaggctgattaatcactccaagactaatcaaacgaacgcttagctaatagcgcgcgatcttttttccccctccccctcttgagtcttgagcgtgcgagaagag

SEQ ID NO: 163 - DNA, 3000 bp, Zea mays
ataattttatgtatcaatagaatttgtttctactctacaatttataggacgatcttcggctcactcctctatagtaaaagtgtagcacataaattaatatctccgacatcttgctaataatagtatataaatatattttgtataaaattgaattagcttaattgatatgtgtctaaattactattattaaaatggaatttaattccaatgatccaaatagaacgtaagtgatttccattttctaagcgaaaatgaactaaattaccttaaaaatgtaaatctcttagaaaaataggttcccaaactaacccggaaaatataaaaacgcgactattccacacctgttctcatgccaaaggcaatcttaggtcattttcagcacgtcatgcgaagtactgttttgtactataaattgcactgtttgtagagtaaagtttaaaatagaaagtgagatatgaaatctattgaagatagtctaaagcgtaaactctctcgatcgtagtcctcgaactcctgcctccggagtgaaacaaaaaatcatctataaaggtatctttagcatcttattcgtctccatcttctattttaaccttcatgtcctgctggatataaccatttgtactctgagtatcaaccgatcatcatttaccaattttacacagtaaaatgcagacatgcactagtgctactgtacgtctgtacccactaattgcttggagccgcggatatggacgtatatgagcgtcgagttgttcgcgcgtcgcacgcttagtaaagcaaaatatggttgttatatattttttttgtttagttaacggtatagaggttagataaagtagtgcttaaatacatacatagatatagattcatcgcaatacgtaaggccatttgacgtggaaccgttaagttgttgtaaacagtgctccctctattccaatttatagttcatttgactttttttattaagtttgacatagtcgttttatttatttttgcgaaaaaataaaaaattcaaagccataattaaagcatattatatgctaaatgataagacaataaaaatcaatagtaattataatttttttaataagacgagacaacagtgtaaaaagtaaaacaaattataaatgaaagtactcaagcatataggttcatagtcacggagtcattgacaattttaccattatcatttatagtcttcgtcagtatgccatcggacccaaatcatagacacatgatgatataataacagacaaccaaaattgagagtggcaaaatagcaaatttctgatagtcatgtgatagagaatagtagacaattttgacataatatatgtacactaattagtcaacaaaagcgatattgcggttaaaacagtgattgccagtgttttgacccgagtgtcctaaccaaccaataaagtaaatttatgctatgtgtcctcgtccagatggatgatgcaagaagacacaagatttattttggttcggacaatagaaggcctactttcagcggagggggatgggatttatattatcttgcacctaagtgcttgtagtagaaggtacaagttagtcgagagagagagagaatcccaactctctgcggatgattgaggcaagtgtcaatatcggccgcggagggcaataggtgaagtgtattgtcctcctcccttgcaagccttggactccttttatagccttaatgagggaatcaaggagtaataattagttgaagactgattaagaaacagtccatctgttagtttttttgtttaaataggctaaagctaattttatctagttcttaattagctaataattattatttcgtaggatccaaaccattcctaagctatagtgctattatatcaagtgtagatctatatgtactcaaggtcatgatgtttgcaaaccaacaatgaaatttatcgcacacattggtcatggcagatcaacttttttgccacaaaacaaacaagaatagtgcaaacgaagttgcataaaatgaaacaatatattatgtgaatagttgcatggtttatcttgctagttccattttaacacacacacatatcttgctagttccattttaacttctacttgcacaattccaaaaggaacctaaatttcatttaccgatgagtcacaagaaacttagatctaattaaatttaaagaaaaatagcaatatttatatttttaaatatatttattataaaaatttatctcatattctagctaatgatatttattatgcatcataactattaaatatatagctatatatatatatatttcataagtttcatgttgtttaacttaatagagatttatatttttagggctagtttggcaaactatttttccaaaggattttcatttctataaagaaaattatttttttaaaaaaaatagaaatctcttgaaagaatagaattgttaaactactcttagacaaataaagagtatccttggttcgtggctaaccgtatcatattttatctaagttagttgttccaattaaagaactaattttatacacaaaagttaagtaaagtatagcaaattagtccgcgaaccaaatatgaccgaaatatcgaggagtgaggaggcttaacccttcccatgtgtgtatctactgttacaccgtgagctacaaagttactggcacaaacgtatagaggatggtgaggacatgggaagataaaatcctggtccagcaagatccgttcttccaaatgggatcaggtgattggctccagttcctcctcccctcagcaccaccagtctcctccagtccagctcccgtcttctccgcctcaagagtctcagaccaacggcaaagttctagaagcacggttgcacgggcagcacggcataacacctccctccactgatccagttccagtcgcccaacgccccaacgtcttctcttgcaaatcgcaagcaaacttcctgttcagctgagctcagccgaaggttgccgtgctcgcgcgcc

SEQ ID NO: 164 - DNA, 3000 bp, Zea mays
gttcagcataaacaacgacatatgtgcgactagtggtagctctcaagcaattcattatttatttttttcgtgcatctttaactatatatcaacctctgcaaaaagaagaagaaagtgatctaagtgaattttcaaatctaacagaacttaagtatgccagtatggtttttatttttgactaaggagcacgaaaaaaacatgactacaattcggcgtccaatatgaactttttattcactagacagcaatatgatctgcgtgcatataatatcttcactagaattcattttccaatggtactaaacagtgatatgtcactgacatgacatcttagcataagctctaattcatcttctgcgttgatagatagcaactaaggatatttaatttgcttcaaagttttgtatgactagctacgtactccggcccatcttttctagaagcaaggcgtttttctagtgtttcattatacgatataaaattgtaatcataagtgagtactctagagtatcaatctaataacagagtttttaatttaatttagaagttatatctctcagcaagttcaacgcagttcaacaaccaacatatagatggccaacagtggcgttttgctagaatttttagtgaggtgtatcataagaatttcataaatactttagtataatttataataatttggtatacaattcaaaatataaagataagaatagcatatggcaatataggtttagcatttaagtccataagcgtgcacattacaataagcgcgtatattagaatgcaaatataatataaaatgtctaaacatgcattgtttgaagaaaaaatgtctaaacatcaaacacaaaatacactggtattaggtttttttcgaggcatcgattgactgatggtctggtgggcgcttagggtatgtcatggcctacctggaccacccattattagatatgctcctgatggccaaacggaccgcacgccacgacactggtattagcactaataggcattacactattatgcactattaataaccgtgtcatatcgtgccagtagtgcctagtcatcggcctagacacgatactatatggcactaacatctagtattacccgtactagtccagacactatttcactctaagagctcaaaagattataacatctttataattacaaaaataattttaaaacatgaataatcataatagtatagagtggatttattatatttaaaaccataataaaccataattcacaatcacatatctttagattaccacttggattaaaagtatctaatcgtgtcgaccacttaatcatgtcgtgctcgtgccaacacgatgtgttgggatggcggcctagatatggcaagggcactatatgaatcgtgcttgtgtgtgcggaagtgctacgagtcgtgtcgtgctcgtgcttagtaacgactcatttagcattgtccacttgcacacgtatagttcaacataaataacatttgcacatgcaacgagcgatagctttggagcaactcatcatttcttatgttttgcatccttgactatgaacctcatgcaaataaaagagaaaaatgaccaatgtggatttccatataatgtaccgatgggcaagtaaataaaggtagtgagacatgaaatatatttttggtgaggttgcagtcatactctatattctcttatttttattgtcaaaatgaataatatttctttatatatatatatatatatatatatatatatatatatatatatatatatatatatatatatatatatatatgcgcgcataaacattctaaaatatagtgagatctagtagggttcaagctcctcccctaccgtcggccagtagactacctataccattttctatttcaaactctactctataaatagagcaatttacagtataaaacaatattttgcatgaccatttacacgacctttcagagatgatctaaggagataaaagatttgcatgagcacaagaagagggaataggagaagaacgaagaatatgagtatttggtgtacataggtctgaagcaagatgaatggagaagggtgaatggaagcatgccaggtgcatatgagtatttggtatacatgatgtatatatatattaaattattgtcatccaacttagaactatattgttccattcctctcctttattgcatagagaaggatgcggatggtcggggtgttatttataaaataaacggagcaaaaaacggtgggtgatggacgaccacgatttaatattggcaccatacacacgaaaggcttatgtgcatatgagatgttcttatgaagaagagcccaagggttgcttcttatgtccacccaatataatttttacattcatttttatggtcaatataaaagaacacccacaatttataaaaaaatagaaacataaggactatgtgagagcacgtggaaggtctaggtgattccaaaatatcctctaatgtttataaatgtcgtatttctagctttttcctaagtcaactatgcaattttctatcgtgaattcctataaactcgtattgtttaacaacgtccgaattatatattacgaaaatattttttgagtaactcaaacgtaaatcttatataatggtgaattttacaaattccgacaaaattgatagtccgtattggacaaaactaaatcaacaatctattagaaagaaatggagcgagtattagaaagccgtctggaacttatcctcccgcgtgcaagtcgatctttgactttaagcatgagatttgccacttgccagcagcgctccttgtataaataccacgcaaggcgctcgctcgacctccaccattcgaaagatccctccaggaaagatttttcttccctcctccgacgccccagcccaccaacacactctataaagcagccctcagtcacacacagaacgcacaagcgcaagccgggcaagaaaactccgcaggccagtctgcgagttgg

SEQ ID NO: 165 - DNA, 3000 bp, Zea mays
agtgtaccatggctacgggcggcgaccgctctctgtgagccattgacctttaccggcactagcgatctgctcccaccttcccttgccccggccttatcacatcagccgccgcgcttttcgatcgccggaaacggagatcgctagcgctagcggtagcggtagtggtagcggctgccgccgcggcccgcgtgcgtgtgcatgcccgacagacgttgcaagcgctcggagaacaggccacgcacacgcgctcactggactggagcctgctggactgactggaccactcctgcgcgcgtcgtttacgtggacgatttaaagcgcctcgttacggctcatcacgtcacatgtcgctggctgggcgagagggggtcgtcatcgtccatcggcatcgctactacgcttggctcgctttttctttcgctcgtggccgctttatcgccgaaaggcacgaggagaggatcggagcagggcgggacgagctgcggcagcagccaaggaggagagagaccacgggccatggctatctatcgttaaccctgcttatcacgcacgatcgccgcagatcttgcctcgcgcgacgatgcgcgcacgcactgcttgtctgcttgcgtactacgggctgtttgtttgatgtctaacttgtcacattttacctaacttttgtgtttaagattagttcttcgattcgaactgacaaagtgtgacacatttaaccacaaaccaagcagcccctacgtcgagctgaaacccggcgtttgcaaagcaatcctcagccctcacccctctgactctgaggcgctgaggtttccatgtccatggctgctgggtgctggctccctctggaaagttttgttgcgtgctttggtttagggccgttcgttttggccgctgtacgttttgacttttggcggtcgggggtcgggtgttgggtggtcgacgcaggcacacgctgcagccgtcgtccgtccacgaccgttcacctctctcgcggagttctcgctgctgtgactgtgatctcactccgtgcgctctttttccgcacctttttcttacaaattaatggcgtatacagggcgatctcgtcttttaaccgatccaaagacaatggttttcggattcctcgctgattcaccagcccgcgcctacaagtacgcacctccgtataggaaagttttcttgtctaatagacgtaacacattattggcacttcaagctcctcgttgtttcttgcgagaacaaaagctccaccatccaaactacaaggttcaataccaaaatcgtcactttgtttcccaacaactcttatttgtagttgtttatgatgacatacgtaccatcgcgccatctatagtaggtacaacttcgttcatcatcggattcaatgggatcgcctccgtacactctctgaactcattggcttagggtttgcatatttcaaggtttacaatgacctactttatggcgaacaccgatgctttggcctctaggtacatgtcgaaggacatcttagatgccatcgtcgtaccttctatgatatagtcatcacttcaccattgtcggcaccaaccccagggccaaaaaggttgtcatgttgagaggacctaaatgacgagagagaggcgaataacatataaaatttcctttcaagattacaaatactagaacaaagttttattaccaaaaaggtggcactaatgcaagtacttgttctaactgtatttaataacaacaaaaccccttaaaccattctagttgctacgtttctaagttgtttttacttaaccacacaaaggagcaactacataactacactaagccctcgtttggtagggcttttgcatcaacaactttagctctgtctcatctgaaaaaatagttcatttcttattttcaagaggagcccctagagaagcacctcatttgattgaaaacactgtttctcctatttttatgggagagagaatgacgggagatagccggagaagccttttttggtttccggcttcactcggtttgtggggtggctccttcctatttttacggaggagccaacggaggagcccagtagactctttgaagaagctgttgaaggagccattgaaagagctataccaaagaggtaactcgagagcttataataactagttactctagagttattaagcaactaatcacactacccaagtaaagctataaatataaatacaagtatgatagtgaggaaaccaattgagataagagagattaacacaatgatttgtttttaaaaatagctttaggatatgcacaatatattgtgtatatgatcgtacaaaatattattttataatatagatagcattgtttgtataataaagtttgaaataagagccgagataagaaatatgatattagctgcgtggataaacttaccacatcaacagttaaaggcccaaagcaatccgacgacctctgacgattccagacttccagtcgcggtcacaggtgcgcgcttttgccttttccgtgcacttttttttcgcgcttttctctagactgccactctcgtaaataacctcaacctcaggggcgttctagctaaacggctctataaattgatctgctgagccgcttccctgcaaaattcacgctgagccgccgcctgttccacggttccacctctccaaaccaaaaactcctaggttttctaaacgtgaattccaatcactgcacacgcggttgtttcggtaagcttctgagagtgatcccttcgcccttccattctgcaattctcgtggttcgatgagaagcaatttgaataaaataattgtagcccttgcaggatgttgtgtttaattttataagcaaggacggggagatcggtcttcaaagtctattttcgtcatgttgcaggtgtgatttgccaggaagacggggcgaattcgtggtgctacctaaaagagaccccatctggtgcggttctggggttcgaggagcggcgaggcaggtgggaaatgaggg

SEQ ID NO: 166 - DNA, 3000 bp, Zea mays
ttattctccaagttaaaagatcacatgaaaatgacaattatatctgaggaaaatcattgctattgtcaatcttgcatggcttatttgatggatatgttgcagatggatgcccaactacctgactatgttgcagatggatatctgaggaaaatcattgctactgtcattctttcatggcttctttgattgtaacttgtagccaacaatgacaataattgatgaagttaagttaaatttgtctgaggctaactcagttgatgcttgtattgttcaattgacatatgttgttgtaatcctctattttctgtcagcaatgtccatctctattttctgtcagcaatgtctatgggccaggccgaccatagccagctgccaaacatattcccagtttggcagttgggcagttggcctcttagcccagctgtgaaaaagggtcacaaacacgatctcgcctgggccgagctcattttgtacagcaacacaaaaaaggtgacttgcaccaactgggccaagccaacctagggctgggccagtagggcaggccgagccagcctagtgcagggtcgcaaacacgcccttaatgaacaagccgagctggctcatttccagccctaaaggcaagtagaaaacaatgacgactacatatgtatacgagagaggatcaggatgagcatggatggagatattaggttaccttggaggccaagttttgctatctatggtgcttatgctatcttcagcagcttatctatttccatacctatattcaaatttcactctgcgaacagtacaatttatagtgtataacggtttaaaacagtgttttggataatcatatgagtgaattgttggaatgcagtctagacacgatctgctctaccaagacggggtagatcggccatgagcccatgacgaccttcgaaccaggctgggctcgagacaaacacagaaaaaacagcctttatgctgggctgttagtagggctaaacgaaatgctcgtggctcgttggctcgcttggttcatggttagctcggctcggctcggatcgactcgtttgaatttttttcacgagctgagctgacatcctagctcggttctttaacgagtcagctcgtgagctaaacaagctaccacattccagcaaaacgaaataatatacatatcatttacggaataattggtgaaaatgttatatataagtgaggtgtctatggcctatgacagtggcgaaaccagtatttctctaagtgtagggcactaacaaatatttatatcagctagaaaatcttaaatcatgcaaatgcatagatgatgacacatatgaccatgaacggataatacaaattctctcgttgcttcataacatacttgagcctctaatatttttttttggcccaagagtaggacccgagccctagtggccccatgcttgtctctgccattggcctatgagttaaactaataattaataaactatgtctttgtgttaaattggtctatgcaatataattgtgggttaaattgatgaacacgtatgtgaattgtgaattgatgagtggtgaattgtgctaatttggtgttacattgacgtggtttgtgaaactatgagtataattactattttctaaaattaaaatagtttgaaattaactaaaaattaattattatgtacatattattttttctgctctgactcgcgagctaaacgaaccagctcgagctcgtaaacgagccgagccgagctgactctttggctcgttagcctaatgagccgagccgagctggctcgttagcttaacgagccaactcggacgagccgagccaaactagttcgttatctagccctagctgttagacttcggacctatatagggccaccaaccttgtctctcgtaactaaagttgtacgttcaagccgctcggtttgtcacgatttaaacccgaaaatacttgatatgtttgacttttaggtccacatggtctgtaattattatggagtgtgccggactagttgacggtccgacacataattgctttaacatgttagactcattttggatggtctgaaatttaaaatccaaatttcaatttgctgcttgaaaatcgcaacagagcataaaatttaaaactgatttaacaaaataataataaaagacaagataaacaattttaacaaaaaaatttgatgtttttattaagttattagaaatggctgtctccttaaaaaaacctttggtcataatagaaaaaaatacaaccaactctatatagtgtttataagtttaatttattatctaatgttaacaacaaaagtaaacaacctctaattcaaacctgcaaaagaaacatctaactagcaccaatttcagcttcgcattctttatttaagtacttgaaagtgtgtaatggagtgcggtataaataaatatatgggtatttgcgtacctctatatagactattttgtacttgtcttaaatttgtcatgcctatgtccgaccgtgagtcgcgacttctgtacaaacatgacctgaaatatcggacgaatctggcatggtactaaaatattttagaacgtattgtgtctaagcctttttttcttcttcttcgggctagcccatcagcccagcccatacacagctatactggtaactaacgattcattttgaggattgaggcaagggttgattatgctagagattgttccgtttgattgatcatccaacatacgtgatacgtgcacgtgcacgctccgcacgcttgatcatccaacatacgtgatacgtgaacgtgcacgctccgcatgctctcgctaactcggggtcgttcgtgctccccggatgggccggcccacgtggctgcgctcggaccacttctttctcttgggctatatattgccgctccgctccacctccacggctccaccacgtctgcgctgtgcgagccacaccgcccgcacaccccaccggccggccacataggccccgacggcgactcgaag

SEQ ID NO: 167 - DNA, 3000 bp, Zea mays
attggcactagcaagttttgcatcatggttgatgaagctcgagatgaatctaaaaaggagcaaatggcaatagtcatccgttttgtcaacaaagaaggacttatcaaggaatgttttcttgacctcgttcatgtgaaggatactactgcattgactcttaagaactcaatttgtgttgtcttaactgctaatagcttgagtatagaagacatcagaggccaaggttatgatggtgcaagtaatatgagaggggagtggaatggattgaaggctctaattctaaacgagtgtccatatgcatattacattcattgcatggctcatcaactgcaattggctctagtggcagcatcaagggaagtgcaacaggtacacaacttctttcagcatgcaacttttatcataaatgttgttagttcatctactaagcgcaatgatgagttactagctgcacaagctgaagaaatagctcgtgaaattgaattgggagagcttgacactggacaaggtgcaaatcagatgagctctctacagaggccaggggacactatatggagttcccattacaagtcaattcaaagcttaaagaagatgtttagcgccacaatttcagtcctacgtagtattgcaaatgatcgttcagttttaaagtattctcgtggtgatgctgcaggtgcactacaaattattgtcaaatttgattttgtgtttattttgctcatgatggaaaagattatgaagattaccgatgtgctatgtcaaacactccaaaagaagtcaattgatattttaaatgaactagattcagtttccaatactaaagtcttacttggtaacttgtgaaacgatggttgggatcctcttcttcaggaggtcaattacttttgtgaaaagaatgacatcgatattttggatctaaatcacaagtatgtttcctttggctaaattattgcacaattattattcatatcatatgaattgatcttatttgcattttatcacatttgtaggtttgttgatgtgaccaaatctcgaaataagaatgataacaccactgttttttcatcattatagatttgatgtgtttaatgttgcaattgatcaacaactgaatgagatagaagatcgatttggtggctaagcgacagaccttttatcactttgtgcttccttgaatccaatacttggctcttttgacatagaaaaggtatgctctctagtggaaaagtattatcctgcagatttttctcaaatcaagaaagaatgcaattagagtgacaattgccacattttcaacttgatgtttgcaaccatccagaactaaagggtttatcatctttagctgatttaacaagtggattagttaagctggttaaagattcttcttatccgatggtagataaattattgagattactcttgactctccctgtgtcaactgcgaccacagagagagtctttccagctatgaaatttgtgaagacacgtcttcgaagcaaaatgggagatgcctatttatgggattatctggtcgttttagcggcaatgattagttctgatgatattatcaaggcctatgatctagctaatacacatagagctaaattcaaaataactgagatgtaattttattttgtttgacaaaatagatgttgttttattatactgtttttgtaatgaaaattatatatcaatatatgcattgtggttggtttccttgccatttttataatgtatccttgctggtttggtcgcttggaggctaagtctgtcccctctgtcttcggatcctggcttcacccctgttgccaatcactcatcatcaacctgaactataagggacaagtcaaacttgtgttcgcatttttcattttatatttgctagatcataaatctgtattgcaatcaatctctagaaacttctagttattatgatttttgaatgggacatctataaaatccccttgaattgcttgttatttttatctggtttgatagcacgttttgtccaagtgattattacagacccactgaggcacgagaacctgctcaaagtcaagcatttacttttttagatagagaccgacatcttggagctaacgtagggtagaaataagaaagaacgagttaagttaagataaatatcttatatattccatgacaagagatgctattccataaattcgattctttcactggacattattttaccaagacctatataaaagcaatccgatccctcatttgaactgcacaagcgatattctcatttcatttatttaatcatagttataatctatcaaataaaaaataaaaaacttataacaaattagatttgaacctaattaaagtaggaatattaatgtatattattcaagtaaggattaacactaagattttgtttatataaaggtaacaagtgaaaaaaaaattcaaaaattttgaaaattggcaaactctgtaaacttaaaagtgaaaaggaaattgaagaagtgaaattaaatctagttcatcgcaacgaaggctcgttagcttgtcgtgctagtccatctcaccgcactagccgccgctgtccgccagtgtacagtggacagggggtgatgactggatgcgggcgacgcgataaacatgcacgtcgagagaatggctgcattttccacaccgcgaaaggagcccatcactcggaaaccgtaagccgtgcaaacaacaggcgacgcaccggcgccgcgcgcgcacgcctatttctagctcgatcgtgtcctctcgccgctccggagtcctcaatccacacgcttgggcgagcaagccttgttccggaagcgcgcggacgacatgctgatgctgcacccgaggttggtgtcgtcgagcgccgtggacgacgaggaccactgcgagagctgcgcctgctactgcgccatggtgtcctgcgtctcgctgctgctcttcatcgtgctggctgccgcggtcagcatcccgagggcctgcgccatcgccggcgtc

SEQ ID NO: 168 - DNA, 3000 bp, Zea mays
atcgaattttctctattttaaattgtcaattgaaacgaggctaaactcatgagttacttgtgcggcattttgtaggctacttctagagctgtacaatgggaaggaccaagacattgaaatccattttagtatcctgtatattgtcttccctattaccattttctgttcactaacaaacctgcatttttttatacagtgtcttctaattttaaatgttcaaaccgtatttcaaaatgtcactttatttctaaatcattattttagagagccatgtgttgtgtataaaattcgcttttgtatatatatatctctattgaccgctattggggtttgaacagctgcccccctccccctcccagcaacacgtacgcaccgacgacacggaagtagcgtattggaaacgaaaaatctaaaaataaaaatcgcacgtcgatgagatggcgaagattcagagttgaacggagtgagacagtgagtgagtcatgcagatacacggcaaatttccgtctccaaatgtctcgctcatacaagcatgcatatggtatttgtctacggtgatttggtagcctcagctctcaaagctctgatgcactagctagtagcgttaggtgagcaggcaagtgaagctcagcttcactaacactaaacaacgcagagcccgcctgagcctgacacggatcgaccagcctctgccttatcaaaaagcaggggggggggggggggaggggggaagtgattgataccacaccaggacactaacaactcttgccgttagagctgtgctagaagcttaacaactcaaataatcaccaaactattgcctacaaattcattaatccagcgactacacgcatatcaggagaacaaaatctgttttcttatgccatttagttggctggataacctcttcctaccagcactgaccatctgcaatacatacattactacactgcctcaactctcgagtctgaaagaagtttcttggatcctaacaccatttgatgccttccgaactcagaagcaataatcaggactccaaatctcggggttgccaacttacatccttagctcctccttgtttaaagttttgatggaaaggtgtgttccacctgctacgccatttcagaaagaaagaaagaaaaaaaatgcacgctcatcgagcatcttccgggcttggttttatatatgaggatacgaacagaaagatggcgtttccttgtccttttggacaaggggtcacttgtaaccctagcgacctcgcaactaaatggaacaagaccattctaaactagaaaaattagggcctatagaaactaaatgtattagaccatgccgagtcatcagtgcatactgcatatatagcctttttttgtctttgccgaatctgtgttatgttttaagtcctttccataaactacagatatgtgttttccctatcttaataagtaaaaaagcagagcttctacccttacaataaaaaaaggctgttagaatttattattattatttttctcgtttcattgttttcatcgttgaattatgcatagaactttaactttagcaatcctttatccccctcccccctcacaaattcagacaaccacccactaagtacatatcaaatgctgcacctgcttcaggagaaaatatttatttaggtacaccgcacacatgacatgatacagcagacctgactttcccttgaaaaaaaaaagagagagaggcaaatttcattagcactttagcattaagagatttacaaaaaaaaaatggacctttaatgtaaatgcaacgagcaaagtgaatttcctgtcccggcatgcatgcagcagcatagcaaccatacttgctactagctagccagtggtgataaagaaaggcaggatgaagctggccaagtaatcccagctcaagaataacagatctacattttcttcagttttgtggtgcgtttttatcaacatagtaccgacgatgatgggttcgttgcactgttgaaaaagctttggaattaaatggaaagattgtggtgacagggatcagagggatgaaattggccgcatatttcacccggagcaacagctactgtacatgaagtcaggtttaagcaatactgtttaggccaagaaggggttcttgaaactgccaaaaagcagagtgatcatgtgatgaagataacttggacaaaactgaccacagaatttggagttcaatgaaaccaacctgaaagccgatcaatgacagagaaaacccggatgaaattggccatgtaatctggagctgcaaacgtaccatgtcgtctatgtttaaaccaccgcctgtttctagtccctaaaataagttaccagccgttgcgagaggtttggacttggctcaggatttctcagccaagtattaccaccggaaaggtgaaactgaaaatgaaaagcaggattggagctatccacatttcgtcaatgtagctagctgtcggagttgtcattagcctgttgtgaactgctggtagcgtagcatagtactgaaattttaaataacacgaaaaactttcatatacaacctacgttaataattaagctatttgctttcttgtgtgtgtagtatagttattaaatacccagctatcccctttcagttaccagaaaggtaattactgacaaggagtagcaggaagagatgagccaagggaactcatgcatgaaccatgtatgtagtgtgctgaaaccaccagcaatttccactcactcactaaactagaaaactaacaccatcgcccatttttttctcaataagatcaagtggaagctttcaagcagctaccttgaagcccatatgctaccaaaccatgccaggacgtaacaccttctgaagctggaagcctttataatagacccacaaccacacaataccaaacctcattccaagctctcttcattggttcatagctagctagttcgcctcccaaaaacacctgccctcgtgcgtggcaggagcacgggcacg

SEQ ID NO: 169 - DNA, 3000 bp, Zea mays
ataatacaagccacattcccccttgtgttccatcttgcgccaacccatctaggcaggggcacacagcgacaaatttactggtcggtccagggacccccgggtccgaaacgccgacaaattgttttcaatttaatattaataaatatactgttttaatcatttgtttataaaaagagaaacagaaagattttcatctagatgaaacttagtcttagaccaactccagcaaagaatggatctgcatccgtatttcacacggctgtgtatgcggatgggtggctgttttgcgcggcgtgttccagcaggctccgtatagcactttgtatccacatgtagtgattaggttgacgatcgggtcccacaagcgcaggctcttcattgcatgctttctcatatgtgtgcgaagaggagagagaagacatggagaagaggagtggacttgcccgacatgtattttgcggagacggatgcgaaggctgttggagagtgaaatagtgacttagagcgtgtataatgtagatgcggagtgagatagctagtgttgctggagatggtcttagaaatcaggatagccatcatgcatgcatgtatttaacacaaaatttcgggcggcaggtgttctgctcgaggcaggtgtggagggatagtggactagtgtggaagaaccatcatagcaatctgcagcacgggctaccgtagggtccctcgctaatgctcatcgcacacgcaattgttagtgtgttgtcactatttttatactattatcatgtgggtttgttaagacaaaaagcatgtggaacggtacctaattcctgttgctgccacatcagaagaagcttcagctccacgaagttttgcaggagatcaaggaaaaggaaatgaaaaggtcatatcttcattatagtagctgcgagcttgccaatggagtcggagatcaggggctgctgcagcagatcggcgcacctgtttccaatagggaggagttaagacgggctccaacaaggtcctctaaagtgttctctatcctaaatatagaggatcaaacggtcctctacgctctttagcaacgtcctctaaacggtcatctaaatttagagaacgctgctggattctctatatatagagtttttttaaacggtcctctatccatttgactactttaaataaccgatttagcaaaactaaaatatgtacaatacatttgagagtatgataaatacgtatgtacaaaaaataaaatttaaaaatgtctttaatatgggtatttgagtataaaggacgtgattaagaggacgttgttggagagaaatgagatatagagaatgaatttttttagagaagactgtaaaggacagatatagaggatgaatatagaggacgttgctggagacaacctaatagacctacttgcgtgaagtaaagatgttgcgttccgcatcaccaaattaatactatcttctttctagaatatttgtcgctcgctagtttatttttaaactaaaatgcgacaaaccaaaaataacggagggagagagagtatatgacacatcttgctacgtaaatccacccatcgatgacacagaatgtggtaacatatgagaaagttgaaaatgtgatcgtagaaacgctttgctatactgcgagaaggtgctgagagcagtaactgacggcatatttgtaacctgaaactctgttacaaaaagctttgcatatgcgccaaagccgtcgtcctcttccttctttcgtgccgtcgtttttactgtgacgctagctcgtgtggagcttcctcgtatcccttttttattccgagaagcgtgggccgtgtggtctcattgcacgctgaacagcgagccatccatttccctttcctatttctcttggcgctgctgattgctgaatcctgctcctctttttgttttttttttgttttttcccatttccttccttggatagataggttttcccccgccaagaaacaattcggaccgcatacgttcatcatcggggatggatagcgcaatgaaatctttttttttcaggaagagtgaatttacgttggccagctgaagctgcttgtcactttgtcagcactagcttgccacctcggctcatcatcatcagcttccatctcagtctcagtgtgtgtcagcagctttagtactcgtttcagaaattagacagaccaaccaccgttttttttccttccatcgtcagcacatgcaatgcagaaggtcctgcggaaagatttagggcatgtttggttcgctaactaacttgccacactttatctaacttttctgtctaaggttagttcttcaattcaaacgactaaccttaggggtaaagtgtggcacaattagtcacgaaccaaacaggcttttaagctttcccgccttttgcccacactgatcattggcaaaaacacgctcgaattccttatgttatccccacacacgcacacagagacgttggttcagctatgcctatcgccgctccacaatctcatctcgaataagatactgacgcacccccatgtctccccttccatcaccctggaaactgcagagcagagctacgcgctataccgcatattggtggggaaaagaaaaggattcaatcaggccgtctgaagagagcatgagcatgattataccggggcggaaagcgagcttttagtaaactgcctcacttgcgctataagtctagctgcaggagtgctctcggattcccaccccccgttctgtagctctcctctaatcctgatttttgtatgcgtggtggtcgctcttccgtctctcccagcccagcagccagcagtcgtctccttctctacctccctcgcatatcctgctcctctgtaaccactgtactaaaactagcctgtacctgtactgtgctgacattatatacagccccttctctttgcttcttgctcgtgccaattggcagttgccattgccaatcaccacgtagagctgcattattgcttgcttcgaggcc

SEQ ID NO: 170 - DNA, 3000 bp, Zea mays
gaacagtagcaccggaatccatccaccagtcatctgatggacttgccataaaggcctgaggtgcataccctggggtggagttaaccatcacgttcccttctttgcgctgaggtggaggaccttttcccttcctaagtttgcatctccgagctgtatgcccggagacaccacaaacgtagcagataaagtcctcctttttcttcttcatctttttggacttaggttggttcatattcttctgtggggagttcttcttcttcttatggaattttctatctccacccttctcaacaacgtgagcctggagttgctgggatggcttgttactagaccttgcacgctcttccacatttatcgcagctgacaactcagtgagagtcatttgcttcttcatgtggcggcgtgaagtcacaaagtctcgccaagaaggcgggagctttgccagtattgcattcacctgaaaactgtctggtaggacgcatccatattggaccaagtccctaacaaggagttgaatctcctgtagctgctccataacagaccttccctcaaccattttatagttgaggtagttttccgttgtgaatgactcattgccattgtcaacttcagagaactcgttctcaagttcagtccatagacccttagcggaggtaaaaccagagtacacgtcaaataagcggttcgacaagacgttcagcagacgagacaagcatgcctcattggcttcgtcccacttggccttctccgctagtgcggcggccttcgctgcatcatcagaatcatctgatgcagcctggggaacaaccgacgtcactacctaaaataattttaggtcagtgagccacatgcgagtcttaatctgccagcgcttaaaacttgcaccgtcgaacgcttcaggcttaatgacatcagaattggaggccattatacgaattcgttttctggattgttgtaatattagagaaataagtgacatgcttccttcatatttaaataaattaaatattctaattccgaataaaacaatcatataactcagataaataccatatgaaattatagcagcaatgaacagtagcaattctaagacatgtaaacatgtaaaatagctacacaggtccatttcataattaaacatggcttacagatgaagaagacagattaaacaaataaacataattgtttatcttaaactattgctctcaaaatagcgggttgctgtaataaacagccctccaacgctaaaaggtgataagagatcctcgactaacgtgacagtcctatcttaccaaataagggttttagatcagatgtaataagcctaataattaaatataaatactgatagtaaggagctgtgtactaaataaattaacagaatttaacacaggtaaaccgcctcaacaaagagagatttaattaggcacaaataatatcaatgctgaaaatgataatacactaaaacccagactgtcacgctgtctcactacaccgctatcatcatcgagcaatcaaatccgcccatagattgcgcaatcacacccaagtaaataatactagcagattgcacaaaattacttaataaatatagacaagtaacgagtaactcacagcacgtagaaaatctacgtgggaagaccagctcagcgaacacaaggttctgtcccagaaaaccaattccgccagccacgtccgggcctgcacagcgggaggttgacggagatactagagccgctgccggagccgagggagacgtccacggcaccagcccgagaagacgaacaccgcgcagtagggagcccaagcaccaggccacggtggacaataatcagaatagacagagcaccacacaagtgcactggtgagacaacggagcgcaggagaaccgcgctgcgcacaaggagggccacctccaccttccaccagcaggattaacaccagaacaccaataatcgaaggaatcgatccaaaccgtgactggaaccgagaggaggaataagaacagcaagcaacagagaggaacagacgactgctggcaatttttggcgagcctccaagcagagagcaagtcttcatccttaagtaaccggagagagaagcggttactgcggaccacggcgtcaaaatcgacaggagctgaaccaactcctgcacgccgccactaggaagactatagatgtccaaacgggccgcccggcccggtccggcccgggcccggtgaagcccggcccgttttgggcccggcccgctaggcacgattaaaaaaccgggccgggccggctaagcacgcgggctcaattccttgtccgagcccggcccgcaacgggccgggccggcccgtttagcacgaaaaaagcgggccgaaaagcgggctatgcgggccgaaaagcacgttttagtgtaaaaaaagcgggcttaacgggcttagagctaaacgggccgtgccgggctagcccaccgtgcctaatttcctgtccgagcccggcccgcttattcgtgccgggccggcccgggcccgcatataaccgggccatgccgggctcggaccgggcccaaaaaacgggcttcataccgggctcgcgggcttcgtgcttattggacatctataaggaagactgccatcctaatcgctccctcctcctctgcgtgcttgcctgcgcgtagggttttggctgccgcgggctgggctgctcggccagccggcccagtagcggcccagctggccggcctttttcttttttttatttccaacaagaaaataacagagaaaatcccaaaataaacagcagtatggtgaaccgcacaaagacagagactgagacctgatcaaacatcagcacagcttcgctgacgcagcccattcattggctcggacgccaaaacctttgccgttaaatagcccgcgccgctcgccttatctgtggcagccagctccaagctagctttgctttagcctcggtcttcgccattcttaatccagtgctccccaccacgcca

SEQ ID NO: 171 - DNA, 3000 bp, Zea mays
cgcgtccacataggcagagaattgtggatagagcggaactttccaggtggaccgtccgactcggctgccgcgcaggccgtccggcctcatcccgtgtccattcaatcccaccggataggacaagcggggtgacacatggtatccacgtaggcaaaaaaagcgccggataaccaactccgccaaattgctgcggccacaaataataccatacacaattgctgccttgtgggtgtccttgttgctcatatatagagagacatacatgttattgttgacaggtcccggccggccgtctatatcgtcgtcattgctgtgcatcccgattctagggattttaagtcactgccctatgctggctagataaaaagcgtcccaataaaagtgcaatatggtctctttctaaaacttgattgatgtagtttaattttctaaaacaacgacgatatttgcaaactatctctctgtagtacctgatggattaaaacatgtgtcaaaaattcagatatggttaattacagcgtatatttaatgcgcctggcctctcgagtaactacggatgtttaattatatattttcagatcaaaaaatgtaaatccttccgaccccaaaaacttctgggtacaatttttttatagctcctgtactatgcatgcacaccacacgtatagctaggccaatgcaccacacgtatagcgctacttgtcttttgaataacaatatggtatagcgactttcaaagggtgtcctcggatcaaagaagtttctgatttggcttcaatttccattaggctaggccccatctaatcagtagtgtgtaactgtataaaacacatgtctgaacctccattagaccggttctcgcattggcatgcacgtcaaaaggcagagaggctgctatgtaagtacttatgaagataaaagaagtacttgcactgctttaatgtgatattattaggtgctccatgcacatattagtcgttgcctttaatgatttcaaattaaagtgagtaatatataggaagcagcttctgcatattgtatattacaccaattgtgccagggccccggccaaatcctacatacatacatacatacatacatacatacatacatacatacatacatacatacatacatacataatcgtcagcgataattgctactagaactgaattaatatatgtcgagttcagaacgatctaactgtatatactcggtcgcaaatattaatctattaattactctcgcatgcatatacattgacaagagtatatggatcagctgcaactgcaagctagctagctagctgctctttggtgatgtgtgtgaaccaatttgggtacacctaattctatctcttcattagtagttatactagctagaaagcagttgcataacgggactccctccgccgatagcaacgtacagcatgcatgtggccttcctatccacaggtcacgttagcattataaataataaataaaaaaccaacggttggatggtagagcaagccagtttggtattgcagggttggatataacatacgagaggaggaatattattatatggtaccaacttaacaggatcgtaacctgatatgtatactcatacaagttaattatatattattctgtctcagcgcagttaccacaaataattgtaggattattattaaatagtttttcttttaaaatgaattatgatttttatatataactgataaattcaaaccaatcaatctcatttgataataaaccatgcaccagctcaagtggaactggttatctgaaaaaggtgtgtgtgtgtacatgggtgtattggagtccatgcatggagcacgtacctaatatcacattaaagtggtgcaagtacttcgtttctcttcattagcgattattattaattttaggtacaccaaatacgctagttttgtcatcatttgaacttcgagtttctcacaacaaatttatggaatctataaacagagttgaagctaataaggccacttgctattattgttcgttgacaaacataggataggagagcaacaaaagttagatatatataccacaaggatgacaacggttaaagtgaccttgattgtccaagaaaataactccctaatagatgacttgatgacaaaaggttatgcaacaactacatatatcaaagtcatagatatttccgcataactacgccacatagctaggtaatagtcaattaattaagtcgctcgcgttgacttctaaaccttttaaaaaaaagatgtcgtaaaagaaaaactaacacacgcgtgccgaatgttctgtgaataagacatgcacactcgcgagcgaccaaactacgtaaggtaacccgattcgacgcgccgcgtcctcggaattgacctagaaacttccctttcatggaacaccaccccatatggcgcctaaaattttaaacacggtgtttatttttcaaaagttgtttggtatatatgatgacgatgagcccgctagtcacaagtcacaacaacctagtgtaccggataacctcaggctaccagacactagggggggctcgtgacgccagcaaacggctcgtcaaatagctaggttggctggctgctgctgctggagagggccggtcgggcgcgggccggggccatttgatgtcttttttttttcttttttctttcaagtggattggattggaccgaaccccctgtccgcctcctcctccgatgatgatgatcctcggcatctatataaggggacctgctgccactacttgtttcgccaaggaaacacacaattcagcacacgcaccaccaaaaagagggagaagaggggatctcggagaagagtcttcgcctcggagagacgtgctctgcctagcatatatagccacgaaagagagtgctggccctgccggccttcgtctagctatagctaactagccagcagcagcgtgcgtgcgtgcgttcaaggcagcagaggtagagaggttttgagagagaga

SEQ ID NO: 172 - DNA, 1949 bp, Zea mays
gctatggcgccgagctaagggtccaaaactgcatttaaaaattttttaggtctaaacgtgattttacttctgtttaagggctaaaatacaaaaaattcgggcgttgcgctcactgtgcacctggctccatgcgtttcatccatgaccatgacaaataaaaaactgtaatgacctaggatacgtttactctttttctagtttagattatattataagggtagaagagtaaaatatcactttaacatcacaaataagctaaaataaatcaagcaattctaacttatttatgatgtcaaagtaatattttatctcttactcttcaactataatctaacttataaaatctagaaggtatatattttaaaaaggacatgacgatattggactgcacatgggaaatcaggataaacagcttcttccaacgtggataagagacaatggacgccagataacacaaaaagtgaggccgtggagtttccaaaccggacttgggaactctgtatacgcatacgctagtagttccccccccccccccccccactttacctaattgccctcgccttggtttaccaaactgccagcggaaaccgtcgtgtgagtgagcgcggtctacggccaaaaaacacgttactaacttaccagttccgtccaagggcagcaccgtaaaatctacccggcacagcttccaataaatgccctcgctcggtgacttcccactcgcactcgcaccacccaaaccgagctcgaggacaccaccacgaacaagaaagaaccgcacggtccccgttgcgtggttccgccgcgtcgcgtgtgcatttgcgcggccgcccaatccgatccggcgaagatcggccgcccgtccgacccggcgaagatcggccgctgctccgggagcacccccaccccaccaggtccgtgctctgtcctgttcttgatctccgcggcggttctgagccgaatccgcagcttgtgctattgcttctccgatgctatttttcttttcacggtggtgtgtgtgcagtgggtttgtgccgctgcaatgggttcgttcaggggaggggtttcgggtggggaaatttttggtgacggcctgacgggtcgatagggagtttctggggcaaaaggttgtgttttcccagccctggacttggggtcgtgcgttgcgtcaggtgtgagatcatacgtgttgactgttgagagctggaaatagggtggggtcacagcacggctcccgtgattggacttgtgaaatatttgcagggacgttgggcgtccgagtgtcaagatcacctttttacctgcgtccacttggaaaacttcctccctgtccctgtgcaggtttcagagaatatgctgcttgagggagtcagagttgagacttcgggggaataatccttagtttatcggctggtatagatgcggctgggctaatattaggagttatgagcatgaattcgatgaaattttgatccgtggggcgtttagggacatgcaaatttgatcgctgtattgtctctgatccagggtcagggttgctaatgaacaagatcaacaaatgtcttgcacagttgcacctgtcaccattgaatttggctaataataaataagcagatcaatttgtctcccgaaatatgctgagatgctttggatcatttcggtgcatctttgtggtgtaatgtaaatgaaacggctgcacgaggcggcattgagattgagatcactgttttccaaccttctagagcatgattgttggttgcatactgttattacgaattaagagtagcaaccatatcatcttgtgtctccttgcgccgggcttgttatcctgatcacatctcccttggttgctttctttcaggtggtaggtaatcgttgctggttccagaagcgtccctgcagccggcgctagctgcacggcggtgacctttctcagcgaaacttgtgtcctc

SEQ ID NO: 173 - DNA, 3000 bp, Zea mays
tcccttgtatgaactagctggtcgataattttgttttccatcctttttgttttcttgacatcagtttgttcattgggaagcatatatgtggaatgatgattaatgtttctgtatattaatttattttatcataacatgttggtgctgtaacaacgtacgagcatacacctagttagggtatatatttgggttaatttttatatttatgggtttgttaataggtttaaataaaaacccaatgagtatgtgagcatggatttgttcttccactatccatacccgcaaacccatgagtttttaaaatccgtctggaaatcaagattccttataaatgtctcataatagtattaattgaatatgttttaattaaaataaactttatgtaacaaagtttaagctaaaattagttgtcacttgtttcttttattctggcttattaatgtattgactgtcatttacatgatgaattattttttatgttgatgttaatgggcatgaaaaacccgttgcgtatctaaaatccgcatagacatgtgtttggcaaaattttatacccgtggacgtattttttcttcgtgagtatgatttttagataagtaatacgcaacagatttttacccattgccatctctactctgatctttcggtgggtgcacagcaacagcgacagcccggtcaacgacccgtacgagcagcagtagccaatagaaacaccttttcaactctcattagacaacaccccgatcgtttcatgatgcctcataagaattagcacgaacatttcgttgtaatggtataaaatgcaaactgactgtacacagattggatggttaagtttgtttatggtcttctatgggtttaagggtgatgagcaccaaatttagcatctaggcatggccgaacgtttcagtcatgtggcccgaacggtctaggtttgggatggtgtgtgagtatagcccgaacgtccgcgattagattaactcagataagacgccttatcccgcacatgcctattcaactaatcacgcgggaatctgttgggaagcgcctacacaacactaggaatggatctagacctccaaccatatatatatatatatatatatatatatatatatatatatatatatatatatatgaggggtatggctaattgaggcatcacctaatagatccgatcaatctatttaccagttcctttacattcttgtactaggagtagtagtatgtagtcttattcattctcaatcttcacctctcctcgcttcaacgtcatttaaaaacgtctttggtggcatgctgattccaagacaaccctagaatattttcttcctgacggagtctctcacggggggacccaagttatgcaggagaacacatggacggcgtgcacccgcagagaagagcggcgccctctgcacaagtcgcagacagtccgcactcacgcaaagatcaccacaggtccttgctccttgcgagcgggatcagagtgcgctaggtggttggtccgtgacggacctaggattttgatcgaggatttgaacctagggtagtcaaggactaaaactttggcatataaataaaacaatatataattcaatatcacatatatataatttcctccaattcggtacctgaggggaaataaccaaaatatctcataatgcttttaatcatcaaattagattgcaagttatataaatttgtttatttaagcctaaacgttaagaagtagtttggttttagactaaattctagggtagtcgggggtctacctaagctacccgttagatccgtccctggttggtccaaaagaagcgccaacaaagggcatgtttgattctcggctaagtacgtgctaaggttagttgactaaattaaataattaatcttagacacaaaaattaaataaactatgataagttaggtatagatcatgcagacatcaagcctttgacttgatttggcgtgactgtctattaagagctaggcacgaccgcacgacccagtcttctagagcaggcgcataaagtaggtagtagtaggatatgcatgcagatggccgaccgagctgtgtaatgggctaatagactagcgagaggctccgtcgttttggtctgatccagatacgaccgaactccgtcttcttctcttgtaccttcaattttaaagacaacaacttcaaagacatatataaattgattcaattatagagataatatcggaataattctgtcccaatctttaaccctaaaccaaacaatcttatttgagaaaaatataacttattcaagagtcatcgtgatcataattcatttatagacaaatatcatatagcaaataaaatctaaaaaaggaaaatgaatctctactattccttatatcttcactgtaggcgtccacaggcttggttctgccatcgcgctccgtccgcgatcccctccccgcgcccgatcctccacgctcgatcctcgaatcccgcggcttccttcgatggcacgaccccatccatctcgccagtgtccgtggtcccctccccgcgctccccaccacgacgacacgaccccatccatctcgctgctgtccacgcccagtcgcgcctcccacgatcacgcccacggacgcaacctccctccctccccgtccccgttcatgtcgcccccgtccgtgatcccctccccgccctcctctccgcgaccccatccatcctgtcgccgtccacgcccagcagcgctcaaaagcaaaaaagggtacgaatacgaatcccaatccagggccggagggcgagcgaactcaaaagcaagctgttccagtccaatccgccccagtccaaatctaatcgccgggtttaggcagaaggggtgggacgcggcgaggtttaggcggggtttgttttgtccctttcgtgcgattctgctctccgcgcgggaggcaagtactgacggaagcgaagaccaaggcggaggagggggtccccggcggtggaagtggaacgcgccg

SEQ ID NO: 174 - DNA, 3000 bp, Zea mays
atacccctaacattggtctatgatatcctaaaggtgttcaattttaattaattggttattcggattcggactttaagggttgcaaggttgataggaagagtacctccggatgttgtcaatttcttggaagatctgttgtttcatggtcttctaagaagcaaaacttggtcgctctctctaccgccgaggtggaatatatatcggccgataattatcgtgctccattattatggaggaaacaaactctattggactatgggatttcattcagaaatgtacctcttatgtgtgataatgagagtgccgtaaaattaactataaatcccgttcaacactcaggaacaaagtacattgatattaggtatcactttttaaaagatcacgttgtaaaaggagatatctccatttattctatggacacagaatgaataacagactgtcaggccgcggaccgttcgccctctgaccgcggaccgtccgccgcatcagggtctggatagtccgatgggcagagtagatcatctgcgctctctaaggcgcagaccgttcgcgcatggctttttagtcagtcgaggcagacaacagaatcactttctatattgccctcaccgcctctctccactcgtttgagaaaacattcgtcttttgcgtggttggagattcgcattcgagcgacgactgtccgaaaaagttcttgacgctcatcaacgatgtcttcttctcggtatttaaattctccaagcaatttgtttcaaatattgtggattttagggtttctataaattggtctcggatctgtttttggctagagtattcaccaaattgtttggtggaattggttatggccatcctcatgagctcagtgcaaaaatttggtttcatttcaatggatatttttttttctaattttgtgattgaatttttttgggtgatttatggtttgaaattcgcccctggtcagtctcggactgtccgccagggtggtgcggaccgtccgacctctagcgcgcaaaccgtccgacccctagcgcgcggaccgtccgccctctggcagagccgcctatagatcttgcccatacatttcaggtaattatcttattattattggtattcttcatatcctatttaagtggatttggtggtctgaagaagctagcaggatgttttttgtccaaacacaccgtcgtgcggatgattatttataaccttgatagagattcagaggcccaatcatctgcgggggcattcaaattctgatctcggtatgttggttttcaaacatcgtctgtcacgaacctgccatgttaaattctccgtcataatttcaacagctcgacgagagaaggaagaaggaaaaaaaacgatgcaaatatctcaagcaaaattttacgtgtcatgaaaccgtccttacgagacccgttctcaactgataaccctgatgtgatgctcgaggccacaccgccttgtgtacgaaaaaggcgcagggcgagtcccctggtccatggcctagcgtgaggttcagggcacacaagcgtcggatagcgtagcatagcatcaggtcgtttatccacttcttggtcgcgtccaaatgcctgcccatccttttgggcccaaccactactgcgtcccggacaacactctgcaaatatctcctctgagctccttcctcagcagtcagcaggcagaaatatcctgcacatagagatatttctagctcctgaaaataaaaaggtgcagcgcagtgcaggcatgtgtcgctgacagcatggccaaaaagcgcaccgggcggatcggatccgagccatgtcttgttgtgaaagtatcaccagcacacttgggcaacaccggaggaccacaggaatgggtcagtgtcaaggagtgggcccaatcgtcgtgcaaccgttaacctcaaaatagatttgctctgaatcggtaaactcgcagatattctctctgtctctctctctctgtgtgtgcgtgtggagtgacctccttcgcaggattaattgttgtgagtgaaaaataccagggcacactaggcttcggctacagatctttaccagcggagatagaacatggtatcggcttgcttgagactagatttgttcacttcaaatgcatggtaaccatatcctgtatccatctgaatgtctcaaagaagacggacaaatatacaacgggaagaaaacaaaagggggtctgattataaacacaacatacaccgacatttttttcttcttctttaagtatatagttcacatacatgtttttgctttctctataggctcaactagaacatggttttctcttactatgttaaagcatctccaaccagagtcataatctgagttgtatttcgaattgtagcactctaacaccaaaaacttgctctaatagggatcctattttttttttaaaaaaaatcatcatcaaataactacaggttcagtctctcgagtcctacgtatagaccccatatgctgtacactgtttctaacctttctttttctaaataacatgatttattttataagaccaactattagaactacaaattttttttgtgcgcttcaaatcagatcatattttagtttttaagattcagttataagacttcttgttggactcagttataagacttcttgttggatatgctattaggatagttaaattgtaaaatttgtagatatgtcaaaataaaaaaaaagggttagagacaatgtccaaataaactcggtaataaagagcaggcactctccccacctcacctcagtcaccactactttcccgctctatccgtatataacacccaccaccaccgccactctccttcctcctctgcatgtctcaacaacccgtctccaagaaaccaccttcccccctcgctccaatcccaatccttctccgcggaccaatagaacccaatccgatcactccccacgcagtttccccatatcgaaagatccgatcggagtccggcagctaattcaccggggaaag

SEQ ID NO: 175 - DNA, 3000 bp, Zea mays
atatcttataagtatttatattggctcaaatccaagcaacctttgcacttacattatgcaagctagtttaaattatgcacttctatatttgctttggtttgtgttggcatcaatcaccaaaaagggggagattgaaagggaattaggcttacacctatttcctaaatgattttggtggttgaattgcccaacacaaataattggactaactagtttgctctagtgtataagttgtacaggtgccaaaggttcacacttagccaataaaaagaccaagaactgggttcaacaaaggagcaaagggataaccgaagtgtgccctggtctggcgcaccggactgtccggtgcaccaccggacagtgtccggtgcaccaggggacttcacgctgaactcctcaccttcgggaaaatccagaggcgcttcgctataattcaccggacggtccggtgtacaccggacagtgtccggtgctccaagtaacggcgcctcaggaactcgccagcttcgggaatttgcaacggctagtccgctataattcaccggacatgtccggtgtgcaccagactgtctggtgtgacaacggagcaacgaatatttcggcgccaacggctacctgcagcacattaaatgcgcgccagcgcgcgcagaagtcaggcacgcccatactggcgcaccggacactctacagtgcatgtctggtgcgccaccggacatccaggcgggcccagaagacagagctccaacggtcagaacccaacggctttggtgacgtggctggcgcaccggacatgtccggtgcaccatacgacagtcagcctcaccaaacggctagtttggtggtcggggctataaatacccccaaccacccaccattcattgcatccaagtttttacactttcaaccatttacaagagctaggcattcaattctagacacactcaagagatcaaatcctctcccaaattccacacaaagttttagtgactagtgagagagatttgcttgtgttctttcaagctcttacgcttggattgctttcttctttcttgattctttcttgcgatcaaactcacttgtaattgaggcaagagacaccaatcttgtggtggtccttgtaggaactttgtgttccaagtgattgagaagagaaagctcactcggtccaagggaccgtttgagagagggaaagggttgaaagagacccggtctttgtgaccacctcaacggggagtaggtttgcgagaaccgaacctcggtaaaacaaatccgtgtgtcacactctttattcgcttgcgatttgttttgcatcctctctcgcagacttgattatatctctaacgctaacccggcttgtagttgtgattatttttgtgaatttcagttttgccctattcacccccctctaggcgactatcaattttcaacttaaattccttttttgcatgtgtgacatttattcttcgtaatattttttccatggatctgacttgtgagtcatttttataaaccaacgccaaacatgaattcatgtttcttacttgaaaaccccgaacaaacatcattagcaggaagcactcgcgttggggtcgctcatcgacgacaagaagaaacttggtgactgccagttcgacctctagaaacagccctacgtggtcgtatgtgccgctatgtacgacaagctctggcgccgccaccgcttggacgcggtgcagagcggctgctccgcgttgtccatcgtcaagcaggggacctcatggtcgtcgccaacatcgatgactctcgggttgttctgggcactgcattcaacaacgacgccatcacgtcgtctagctcatcgtccacctgaagcccaacctgccacgtaagtcgctactggctggccatgaattcttgtgtgctgagacgatggccgttgctgacgttgtatgagtgtccttgaacacaatgtatgtagaggagtagcgcatccggtggtgcaacagtcaggggtactgccttgttgatgagcccggggtgcacttcattttacagcccagccaagagtcatcagtactcggtatgtcgcgcgcgttcgatgactactatatcgaggaccgtggcatcatcttggcgccagaggtgacacagaggaagaccgacaacaatgaccagttcgtcatcctcgccaccattggggtagcttttgtgccggcttgcctttaattctcttcgcaaacacacacttgcctttttgtttaagcaaaagcgtatggtggtatgtgtctgatgactaacgatgtacgatgtaattttttccggtatgtgtggaacgtgctctataataatgagactatgcaaatcgtgacatatatcgaagtctgcatgatactgatggttgcaatgtagtgatgaaacagatagattataaataacaaaatttatgtatggtcagaatcacaaattgattatgaaacattttctcaacacatattttgtatataagttatcgtagtatactcgtattatatattcccgttgcaacgcacggctggtcataaaaaatagtttgaaaaaaaaacgttagcatcggagagaaccgtgtccggagggaagattgagagaaggactgcagggcgtcggatttgatttgggtacccgaatctcgaggaaatatctctggggcgggcgagtcggtggtccacgtggagtctaaaatcctgtcctgatgtgcgcttttgccctttattcccaaatacttacacgcagctcctctgctctgcctcccaatacccaccaacacgccacacaacacaaatatctccgtccttgtcccccatctctctcgcccgccgccgccggttgaatcgacggagggaggcgttgatggattgctcgattcctggtgggaattgattgatttcagctgcatgtgcttgtgcttgtgctgctcaatcgaattcgagtccgaattggattaggcaggtgggttgggtaggtgcgggatccagcgagcggagg

SEQ ID NO: 176 - DNA, 3000 bp, Zea mays
gtacttcaatcattggtgaacgtgtcactggacactgaatcacgctatgtttggtagcaaatgacatatagatgcacactcacatgtttctttctttctgttttttttttctttctaattctttgtaggaatactatgacccaaaccgttcaatgctggagttggtctttgctcctgcagacgaatggattggtcgaagtgacactgaaatcatcgatgcaactatggaagagctagccaagttatttcctgatgaaattgctgctgatcagagtaaagcaaagattcttaagtatcatattgtgaagacaccgaggtgaggatatttgctgaagacacttcctgacagataaccataagtagctctagctctgataattttatgtgttgttttctaatgtttgtattctggcttgctttgacagatcggtttacaaaactgtcccaaactgtgagccttgccggcctctccaaaggtcacctatcgaaggtttctatctagctggtgattacacaaagcagaaatacctggcttccatggaaggtgcagtcctatccgggaagctttgcgcccagtccattgtgcaggtaaataaatatactcaccgtggtcctggttgtgcataaaagcatcagatttctgtgttgttggatttatttcggtatgatacatgttttgcagctaatgaattaacatttactgcttccaggattatagcaggctcacactcaggagccagaaaagcctacaatcaggagaagttcccgtcccatcttagttgtagttggctttagctatcgtcatccccactgggtgctatcttatctcctatttcaatgggaacccacccaatggtcatgttggagacaacacctgttatggtcctttgaccatctcgtggtgactgtagttgatgtcatattcggatatatatgtaaaaggatctgcatagcaattgttagacctttgggaaagcaaaagcgataaagagatctcagatagatattgtgttctttcagacggtggttcctattcctatcaatcggttaatccatcccacatgggaggatttgtggtaagcttagtcagcaaacctctggtggtccctgctccctgaactttatcgggagagctgctgtagcaatccccgaagccgtgtgccgtttatcttgtcgggcatactttatttgccgagttgcagttattaagcacagggaggtgcggaatgcacttcgggcgtcgaagatatttttgctcagattccttgcgtctcaataattgtccttttgaatcccagatattatcaccggccacatttctgtttgtactgctactctacccctgaaagaaatagatttctagactaaataatatttcaaaataaatcaaattttgcgtcataaccatctattagaatagatttctatacaatctgtttcaaaataaaaataaaattttacgtcttcaccatctattagacatttatttcttaggagtttacaacggtcaacgtacccatttattatttctagacattattatctaatgtttgatttagtggatgtaacaacatttaatatgttattaaaaatagcaaagttgattgctctagcttttcagtaggtgatgtatccctccgatctaaaatagttatcgttttagcttttgatttatgtttatattcaaatggataataatatacgtacatcaaataaatattatacgaatttattaattatctaaatgtattttaatttgggacagagagagtaaaagatactaggatatttttcttgttgactaatctgttctaaactcgttagaagtgtgtttgaaacttactaaaatctattctttaatgcacagagaaaccactgatacattatgagtttattatctggcaactggcgagctggcgtgtgcctctgatgttacatccaccagaaaatgaagtggtgtaactggaccaataaagcatcagaacaatataccttttctcgtcatttgtgttgcaaaagagtcatttgctgaccgctcactaggatataacagaataaagtaaatggcagattattcagagagctagccatgcccatacggcagcaggacaagactgggcgctgaagataaacatctccaggctgtgatgatcccatcccattcccatgcgcccaccgcttcgttcctccggttgcaggacaagcggcggcgggtcccaggtgcagatcttttcccgctaccctttccctgttgcggcggcaaaggagagagactgcgagcggacggagaggccaacaaatatccgaggcccgatattttccctgcccctgccacgtgtcggacgtccacgtggaaaagcgccggcacgtaggcgtaaaactatgtccaagggtccggtagggtgccgatccctcttcaatcctgtctactactactatcatcgccgtccttgtgtttcatttttaatgaccattctctcatctgctgctggctgcggctatatacccccctctctctgtctctctatctcctcctgttcttagacgtttctccagagcctgaagccaaatctagggggcttgcttcatctgctgtccgagcgtggtttggtttctcggggctggcgcggtcaagagctcacctgagttccaccgaaatctgccacggtagttcttgcctaggtgtgtcgttgcgttgtgacccttgcggattttcttgtttcttttgagttgcgatctttgcaggttagtctcccccccaatccgtagtcatccggcgtctaggaaattgcagtccagtttgcttatttgttcgtctagtgccttctccccatcctggttagaaagaatatcggaaggggggatttttttttttttgcctgttcgtagaggaagcagtgaagacataattgttgcatctgataaagctcgggcgaaatacaagcaaatccttggaattttgcatccctttgctggctcttttctgattcagagaaccca

SEQ ID NO: 177 - DNA, 3000 bp, Zea mays
aaactgatatatcagccgtgctcgcggttatgagcggccaagggagctctagtgattagtggtacttgatcaaagatgttcggatttgcaggtggcaatgagattgatggttcttggtagtgatcaatggagagtcatgatcttcgaacagaaagggaatcacggcttgtgggtaaagtgcacaacctctgcagagtgtttgaaaaatgatatatcagtcgtgctcgcggttatgagcggccaagggagctccagtgattagtggtacttgatcagagatgttcggatttgcaggtggcaatgagattgatggttcttggtagtgactctggtaatggtaagtagtactctttccgtttggaaaggagtacgtttgggttaataacgtgggttaaatctaaaacttggctttctctactagtaataataatatgaccaactaaaagcaactgcttgacttacccccacataaagctagtccactacagccgaacaggatacttgctgagtatgttgatgtgtactcacccttgctctacacaccaaaccccacatctccaggttgtcagcattgcaacccctgctcaggagaagatgaagctgtggaaggagagcatcaggagttccaagattatgatgagttctaggcgtgggttagcggcaacccccaatcgcctgcctgtgaaggccacgtttatctacgtttcttttccgcactttgatttattgtaaagagtatatggatgtctcagacatatgatgtaatcgactatttttcccctttttaatactattgggacttgttctcaaatgctatgaattaagaacaaggcaacatagaatgttaaatgttaaagcccttcgtccgctcaagcattatttccccaaggatttaatgtgcttcggacgaaggttatgaatagtatatcacgaaggtcacaccttcgtgattaaagataaaacaatgcgaaatgaaatataaaatataaaacgttatagaataccaagaataaataacattattcacttattttataatgtgaacttaaatattaaaatataatatttaggtacatttataccttcgccttggcagaaaacaataattccagagtgatgcgttagcagttaccagattgcgtgaacagtaaaggagtattgttcatctatttataggcacaggacgcagcctgtaagaaattataatcatgccccttacagaagattacaattatgactcagacccttatgggactaaaaagtcattccatctttatgtcggttcaatccttcgtctttggatacgttatagtatcgaagcttcatgagcggtagcttcggtatcacgtctaaacagatttgtcgaaggtgtttgtttctgcaggaccttcggcgacgaagcatggtcccaacaagcactgtgtgatgatgtccatgttatgtaactgctgtgtacgtgaattgctgatcctggcacgtacatggttcgcattcggtttgccttctaaaaaccgggtgtgacacatatagacaggaatatcacaaacctaaatagtgctacgcgatagcgaattaaacacctagcggcgaggcgttgtagaattttatacggaaacactagttactgatatacgactatgcccaattatcacacttttctagcgtgatcgcatctacttcaaaaatcaagtgataataaactaaacacaagtcctatatcaaaacatgcatcgaggcaccattcacatcacctaccaattgacgatcattatacaatgtgattaattcaccattgaacgcaagtaatcacaagcatcagatcaattcgattacactagacatatgtttccattttgtaaattaagatatataagatacatgtcgacgatgctaaccacaatcgaccataatcatacttaaaactaacttaactagttttctaaactattttccatattcatttgtatagcacattaattgattacaacatttaccgatcataaacatagaccgattatactaattattgatatagaatattattgatatagaatattgactccctcaaataattaaaataggaataaatacattgcaaattcctgctagctagctgattaaaatattaaacttatctgtctcgtcattaactagatcatacatcgcatccatgtctacctctatattttgcataattatgcatctaaaatttaaacctcaatctctgactcaactacttcattattctaaaaacaattatattgtcacgtaacagcacacggacacaacaacggagctagccataattactaagcgtacctatactaaataaaaaaaatcatcgcaacctacatatctatcaatctattcattaaaacaaaataatagtagtagcaaatcagctcatccaaaattaaattcgacgcgaactctgcaagaaccacgataatttatagttcaggcttttcgtcgagtatttgaggcatcaacttggggcttgtttttccacattctcttaggatccttttgtcggcgcgaacacaagtaggagatgtcatgaaggaactgacatcgaagtgaggcgacggaataacgacaacggagtggggcagtgttgaaggagctcggcgtcacggtaaatagaagttcgacggagactaaaccgattgccgaacatgaactgcgcaaatcgacgacgcgaggcttgatctggcgagcacgacgcaaaggagggcgtctcagtaactgctccgacataaattactcgctgctgagcacgacggaggccgggaagctgctgacggtcggcccaacagcgagcaggggtaccagggcgtgcgtgcaggaacaatcttgacagtacgcgtccgagcgagaccacggtactggtaaacggcgggcgaccaagcaaaaatccgagctgggcgagttcgacggccacggccgggcacagatcggcgcgatggagagtcccaggacgcgcgcgggggagcagaggag

SEQ ID NO: 178 - DNA, 3000 bp, Zea mays
cattccttggccaacaacccccggtaaccctcagcatccgagccgaagactcccggagctcgggcgaagacatccttccccccggggtcgcgcatgtcctcatcaactctctagcaaaaccatcggaaaccccaagtcctcccatagcagtacctaatttcctctttttagaggatggggcggccgccggcgcagggtcgtctctagtctccaccactggtttcttcccacggcggcccacatcgtcttgaccaggatagccgtcatacggcaattgattcaattcaaaaaccctgttcaaacggtcattcgacccgcggatatccctgctgcgctggccctctgtcctcggcatgtaacaaccaacgagccgcactgccccatcctccgcctcacgcacaaaggcggccggatcgcggctttgcaggttcagcgcgaaggcgggacttcgcaccacccttccaccatggaaaggcatctggcgagggcacacttcgcccaacgcccagccatgcgccaagggccataccccgtacgccacaaattcttcaaccaaattgtgcccactgctcaggccggcggtgcaccgaagggctccttcgtccgcatcttcctccgccacctcaaagggcgggtatgctgagtaaaaatgagaacacatctcggacacggggagtccctcatggccttcgacggtaccctcagcgacgtaaaaccaaaactcattccagttgccccacttgttgcgggcgcaaggaaccaactcgactacctgcatcgtggtcttgccggtcttcggcgtaaacgtgcaggacccaaactgagcaacttcatctccaatcatcctcttctgccagtgcaaacaataatacttcgcaaagacttcgaccgatggttgtccgccgtacgaagtcgtcgcccagacatacttcgacagagccaccacggcattcggtgtcagctgatgtatctgaacgttaaacctgcgcaggacttcgccaacaaatcggtgcgcaggcaggcggagaccggcggcgaagaacgcctcgaacacaaccaactcgccctccggctcggggacttcctccgtccccgggacacgagcaacaccgccgccaaagtaacccaaccgctgcatatcttgcacgcggaccgacgacatctgcgacacaccaaaatcaacagaatcgcccgcgcgcaactcctccgccatcaaactactcagcgtctcctcagacgaggcgtcggccggcggcgaggcggcggccggcggcgtagcggcagcggaagaagaggaggtcggcatcgctacgtaccatcggcggcggcgggcggtctgcttcactcgagccagatctccggcgaacaagagcacggcgggcagacgagcagcaaggcggtgaaaaaggcggctagggttttcacggagcgcggaaagtgaagttcaaaaaccgccgacccccgcccccttttatagacagggcgtggctcttcgagaaacccgcaattcaacagggcgcggcgcttcgggaaacccgcaatccaacagtacgctgtcaatcaacggtcatgtcaaaaacccccgcggaaccacttcgagcgagggcagcgtctccgccatctagcgacgtcttcggcaccaggtgactttgtcgaactggtccctcggagggcaaatgttggggcgaaggcaaagacgtcacccttcgctcgaggccttcgctgcagtcgctggtctgacagagacaaaacgggcagggacacccttcgctcgattcggcaccagacgaaggcctgcgacggcgtcatcccacagtgcgtcctcgtccagctcagaggcccacgtgtgatccggcccattgtaacgggccctgcgtggccgccgcgtgttacggccctaatttgtaaaggcatccatgtaattacagtctgtaaccctgctttatgagaatattctggggataacctaggtagctgagggcacatgcgtccttagcacaaggcgctgggcgctcaggtacctataaatacccccgcacagtgcccgtgggaggccagattaacagagttattgtcatctagcgtgtaaccctactaacgtcactgttcacccttgttggccccccttgcttgtgagagcgaggtccaacaccaataaaagtttgtgttaaatagttaaattttgttgactaagctattgttcaaaaggctatagtaatattttcttttaaaaaaaatcttagtacgtgtacgtctcttataatctggagagtagagagcaggtggcttttacacattcgcattaatttgaagaaaaccgaaagagcaatgtcgtgcacgcgacagcagcgtcgcggaagaaaaggaaatgcaatttcttttctattgagagagaaaaggcaatttctttcttataccggtaattgtagccaatacccttgttacattttaatttccaaaaggaatattattggtcatgctgaggggcgaagctacataccgaatcgaggccagtaattatgtatacacacccttaagacatgttctgtgtcaaggaagaaaagtacatgcaatttcttttatataagaaatgccactatttatatttcaatttccaaaaggaatactatgggacgtgctgccagtctccaccggcttctttcctgcgaagcgaaggaaaaccacgacgcaccgttggttgggagatccagtgcctggtccaccggacccagctgacgcactccctcgcctccgcgggcccaccctgccgcctccgcgggagatatttttcgccaccccgtcggggcagattccgtaaataacatgcaaccacgccccttttctgccgctcttcccgcgcctataaaaatcaggggcagaaatatctcccctacctggcagcagaatctgatctccattttcctcccgcacccaacccaaccacggacgcacgccgaggagggagaaagcgggtgtggaggggcgggcggccggcctcgc

SEQ ID NO: 179 - DNA, 3000 bp, Zea mays
ttctatgatttaaacaagttctagcatttatttatctattaataatccatttatagattattttctctggttttataatgttctggactgggcctcattttctgtgaagcatagggggctcggggtaagaatccagagacacagagaacagtccacaatggacgacaggttgattataataaaacagagggtctctttagaaaatgtacccgcaaaggggtatcttctaatctgagccatccgatcgggattctctggcctggattgaatctagactttaatgaaccggtacgcgactgcagtcgttggatccgcgatccaaggcccagattcaatgaatcgcgcgaactgcctcaaccgtttatctcgagatcaacggccagatcgtttggtggcgatggggatctcgtgcactaatccaaatcattcaacgcgagatcaacggtcacggttttacgaagccgtgacccttggattcgatcacaacggtccgcgcggcgtcttccaccctggttcacctggaacacggtggcgtcccgaacgcggcaatacccacgccggagctcccgattccggcgccactaccccctagattcaacatcgaccgatccaaaataatacgggggcgcagacgaattaccagagagggtttgcaccccagccgatgatgtggatacccacggacgcgacggcaccccggccgcggagaagacgacgcgacgacgtgcaattccagggcaacagtgcaccaccggaccccacagctccgcgtatacgatccacccaccttggcgaaccccacggttcctcccaggtcaccgaccaacggcgcgtgtgaagaacagcaccggcggagatccttccttcccccgatccgcacacctaagtaccgttggctggctaaattggcgccagaatagagtctagggtatacgatggggcatgcgcgtggtcgagacggctcctatcttaaaggcactacccggttgttgaagtccccggcgaggattgcgcacggcgagctcgccgtctgttacggaggtgggggcgcggatagagctgacagccctggcccacatgtccgagaaagggggtatccgctgagtcgacgggctggcgggcccacatgtcggctcattcccaccggctggctggctccacgcggagtgtggaaatgggccgcgaagggggaaatggtatggtgggccgaatagagtgccgctggcccagttaagtgaggtctttttttttccttttcccttttgtcttattttaaatttctttttttattcaaacttgctatttgaattgaaacttggttttcagatcactcaggttatcaaaacaccagatttacaagtatatttatattttcattcccatttatattttatactcctttcttttcttttcttttctttccttttctctcttttcttaattctaggattattttaggatttaaattcccatctggatatttaacatatttctttttacattattataatattgtcacaaaaatgcacacacaaataaaatatttagcatgatgcaatgatttagtagcatatctttttattacttgtttttgggtatggtgttcacatatgatgatgcataaagatcaaactcacataaagagaaattgtttctctattggtattatttctagcaatttacaaagtgggtgttacattttctggcttctgctcaaagatagattaaacacctgctcactcctcaggcagcgttcaatgccactggactcttacacttgcgacaattgtattcttcaacttgaagagacgactctccatcttttttcagatgcaactttgctaggagatgttgtctactcttaggcatccgtccgccacaaacaactgatctaatccataccctcctgaggattagaatgagatggcacgttccatggagattggaaagcatcatcgttatgacttggtgtatttggaaaagcagaaacaactggattttcaacgagactccacccacaaccaatgggtgcaaggaaatgtttaaaaaagaaatgagtttggtgtgccaccgagttaagcctgctatgaaggataaaattagtaattggatgcagaacgttgtaccgtaatccttgtttcttttccttgtaatctgcacgtttcaaaatttttttttgaagcgaagtatcttggactcccaacaccggacggaccaatttgtgcggaacaattttcaaccattgtcagatcgaaagaaatgtctagcggctggtggtaaagatgtttttattatgtcaatagcctaagaaatctatactcttagaaaacactaattttcttgttttccactgtcgacccttttacaaaatacgagtatacaccgtgagtgtttttgagctcccgaactcccgtctgaatgggccgaagagatgcattcatgcattagaaaataatgttgatgggaaagatgtaaaaaatggttattttttctccaacaacctttcagaagttgcacggctcgtcaatagcaatcttcatggcccattaacaatgcgctaacaaatagacagagtccaattcatcgaggcccacgcaacgcgggcacacaaagattctacaatccgtggcggagccggtggggggatcccaatgtcgtaaatagctgcggagccggtggcggagcccgtagcgggcgctcgaaaatatctcggcacggctgggagctctggaaccttcgctggcggctccaacccccgacgaggcgacgaccacagcactcccctcctatttatttcagagaaagaagacgagagatatttttctcacgccctccccgcggaattatacctttttttttctctctctctcgcctcgcttccttcgaatccatccatctctcgcctccctttccaattcgatgcctttgtagcgctgctgcctcgcccccgccgcgtcgtcgcgggtccccggcttcgcttgctgctgcgcttccagcgtc

SEQ ID NO: 180 - DNA, 3000 bp, Zea mays
gcggaacaaggagaagtttcacaagcgtgtgtcgccgctggcagagcaattccccgacacgctactgctcgccgtgtcgaaccccgtcgacagactcgcccacatcgcctggaagcggtcgggcttccctgccacacaattattcagctctagcaccgacctcgactcatccggaatcgactacccatcgccatcttcgaaggcccactaccagacttctcccagccggagctcacagactaggaaaaagtgcatcaatggttgtctagtcaacttgaagacagtttagaggtgcatattgctgttgtgcttgcatacttacagaatgtcgttgtgaccccctatggcgacctcaatgggcaactttgtcaacgccatgacaatgtttgtgctgcacacaaagtgttctaggtattccctcttagcgcccctgctgcttgggtcattattgggaggatcttacccactcggtgttggaaaatctcatggccaccacccattttgttagaaagtttgcatgctggaataggggagctgctgctactctcggccacttcccagtaggaccattcccctgacatggtgccatcaatcaattctgaggaaccctgactcgtaattttggaaccagaaatagtgtctacacgctcaagccatgtggaaggttttctgatagatagaatgcattttgtggatggccttaaacacgatatcaaaactgttgttgatactgcttgtgcgctcgctcttatgcaagaggaagcattggagtcctgtcgccgccaccgaggagagcctattttccatctgcatggcttggccacaagggggtacttccatgaaatttagcaaggaagatcatactgcttctctggacaagcccaacactaaaaatattcgttagttgtccctaattgatatggtagcttcattgagcaattaccgtcgagaacatgtactctgcggttgctgtgcggagaaatggtcatatggacatcaatgtgccattacaatccaattacatgcaattgaggaagtgtggaaattgctgtcaacggaaggtgctcaagaacacatacctaaaactactaaacaactattgctggcagtatatgtagccgcatggtctgggtctgatggcgctgctacacttcggctacaagatcaaattcagcaacacgagttaatggttcttattgactcgggatcctcacatactttccttagtgatcgctcgtggcctcagtggttgggagtgcagatattgagacaatctctgctggtgaaagttgcaaattctgatgggatagacaagaagacaacacactcattatacattgcagcgaaggaaaaaagattcagatcccaaaatcagccttggattctcttgttggtgcattggcaaggcatgatgagaccatcattggtactgccctggagttgcttgaatatttgagaattgagagaatggagtttattgtggaacaaactgacatggcatgtgattcatgggagaattcatggagctgacccagtgtgcattcaaggcagtagagctaacacatcatcggttcttatgcatttggcacaagtgtgtgtcaggtcagtactattgatagtgaaccaaggcaatttctcagccttaggacaagttgtatttcaagaggtggggaatgtcaactcctgccacacaaggactcaagaagaccaagcaacgaaggaggacttgtcggcaatgtcagcaagaagtagtcatcagatcagaaaggaacatgcgaagaacagtcttcaggagctggcgtgtctgattcagcgattgttggggcaaggcatcggccagagcgcgccaagaaggtgaactcaaaggttagtgagctgcagtgggtcgtgtagatggttgttgggttgtattgtcgagctagtgatttgttaagcctagaaaagggcacgttatatactggaattgtatctgtgaaagctatgaagaatagaatactgaattcagttattgtcatctccttcgttcccctttcctctcctccacgaaactatcaactactacctctctccctctctctcaagttcaaggagttgctaacattttgcttaggaattatttcactaggatccttgcattgtggaaccaacggcacagaatccttatcaatgccttcttcgaatcggaaccctgatgaacgttattgcgagcgaatttcctccgcggtgaatcatgtatagtaatcatcttaatacgaatttcatcctttggcctttgcagcctgcagtccggctagaagcaatttaataagggcctgttcgattcttgaggattggccacccgtaattattcctagccagattgcttgtctaatttatataaggtttgattagctgaaacaatttcgagatgaattccggcacaaacgaacaggtcctaaatggttttacaagtggagggagacggttttgataacaaaacctatactgtgacgatagtttagaatgtaaaaaaatgttttttagaaaaaacttttagaagctgcacggctcgtcaatagcaaccttcatggcccaataatagtgaactactagcaaataaacagagcccaagtcatcgaggcccgcgcagtgtgtctagaaggcaaaggttccacaatacggaaggggtcccattttcgtaaatagacgcgaagcccggtggcgaaggggggagctggcgctcgaaaatatctcgccgccgcacgcgctctggaaccttcattggccccaaccctcccgacgaccaaaactctccccgcggaataaaagaagagatattttttttgtcacgccctcggccctccccgcggaataaaagctttttctctggcctcccttcctccgaatccatccatccatccatctattgtctcccttccaattcgatgcctttgtagcgctgctgcctcgccgcgtcgtcgcgggtccccgatttccgcttgctgctgcgcttccaacacc

SEQ ID NO: 181 - DNA, 3000 bp, Zea mays
cggagttcgccgtcttccggggctgagcccgagtccgagccctgggtcgggcggagcggagttcgccgtcttccggggctgagcccgagtccgagccctgggtcgggcggagcggagtttcctatggtgcctaaggctgggcctgactgcctgtcagcctcactatgtcgagtggcacagcagtcggagcggcgcaggcggcgctgtccttctgtcaggccggttagtggagcgacgaagtgactgcggtcacttcggctctgtcgactggaggacgtgcgtcaggataaaggtgtcaggccgcctttgcattaaatgcccctgcgatttggtcggttggcgtggcgatttggccagggttgcttcttggtgaagactgggcctcgggcgagccggaagttcgttcgtcgctggaggggggcctcgggcgagacggagatcctccagggtcggctgcccttgcccgatgctgggctcgggcaaggcgtgatcgagtccctcgaatagaccgatccctgacttagtcgcacccatcaggcctttgcagctttgtgctgatggtggttaccagctaagaattagtagtcttgagggtacccctaattatggtccccgacaaaagtgtttagagtggttcggaccaccagaccgtaataccctacatacattgtgtgttgtattgctgagagtcaagatgaacttagatccgatagggcatgagggagcttgaacttttgtatcgcatgtgccctcctttttattgtgcattatgtgctgtcaaagtgtatggcatcgcatcaaaatgctgatctggattccacggcaagccaaaaaaaacgatgagcattggggacattttctattttaatcctaaattgtcaaaattttaattaattcactctttcctcctgcttgaatacataattggctaattcagttattataatctagtagttatacgtcgctcatgcttgatgcgtcctgatgaaatatctaatgtcaaggtcatttggacagtggtccgaaagatctagatgtcgggggtcgcgctcacaacataggcagaaaaggagaaatggacaaaacatcatcctttcatagaaaagtcctttggatgcaaggtcgcttttatgtcatgaatcatatggggccaaatcagggggggctcaggatttggaggatgatattcggaattttagtgggcatattttttaaccgtctaaatttattattcatgagaacgaataattatccatcgggtatatatatggtataatttgttattcacacatatgagtataaatataataaggtatccattgataaatttttcatgggtatggtatatcatatccatagctgttacccgatgggtatttgatatgagtacaaatctatacctacgattgtatatgagtatgagtatggattcaattttgtctcgcatttatggatttgtgaaccatatactcgtgtcccaaccgcacaattgctatccctagtcatacggtaggaaaatgaaaaagaccggcaaaaagcgaagtttggaccaaacatctgtaaaacagtgttattttatgtttttacaatatttcagtgtatagatataatatgtatacatatatataaattttgttacaaaaaataatgagtatttaactgaatacctttgcttgtaaatggaccgggccaaatcccaaatatatatgtcgctcagatatttgaggggacgtgacctattttgtggtacagttgagcccaagaagcttgcgtcgtgtctcctgtcttggctgcatggcatctttctcgcaggtacagttggtgggatttgcttacgaggcgtgatagctacttcaacggtcacaatttagagctgttttttatgttgttcgttttagattaaagccagagtaaagctgtagattaaagccagagtaaagccgatttatctcctgaattatagttcatttaactttttttttgctaattttgaccaacttatcgtatttagtttttttaaaagataaaaaattcaaaacaatatttaaagtatgttattatatggtaaacaatatcagagtgaaaactaaaaataattatgaatttttttttaaataagacgagcataccaaatttaggtaaataaatcacacaaattataaattagaacaagagagtatagtctaattacaacagtcaatgattcacttatatggtgttacaataaacatttgctatttttgaattaattaggcataaaatttttgtctccgtgttaaatattttgttgtgtgattagttttataattagactatatttaatactcgtaatagacatttaaaatattcgatgtgacatgaggctaaactttattatgacatatacatttgaaaatgatgtgaaaatatcacccgaaggagacacaaagatatgatgattcacctgacgagtggacgatgttgagagcaccacagatattttgctttaccgatgggctaaatcagccgaggatcgccaagttgttattggaggggtgtttggtcgttagtccatcatcatcgtccactggtagagaactgatcttcagtacagtatataagtaggaaagtttatgtacacttgctccataaaagtatactacgtctcgatctaactagtccaccaatccaccctccaaaatatctgcatgcacgccaagcaccagctgctgctacaggtgggtgccacgctgctgccagcgagcccagagtgccccgtgaccagtcacgcccggccccatctgcaaacacgttacacgtagccatgcatatggcgccagccaagatatttgttgcagccgcctgccgccctcgtcccgtgcgtccccttcttaaaccttggcagtgcaagcccaggcagcctcatcccctcagtcctcagtccctcacacactcactatacactgctctgctgcagcaagaaggaagaagctagcgcctccctagctctcgttgtcagca

SEQ ID NO: 182 - DNA, 3000 bp, Zea mays
gtgaaggttcgcaccatgcgcccagcggccacgtggcgtcattagacctcttcctaggtccagagtagggcctgggagcatgtcctgccttggagcacagggagcccttgttggcgacccggaccccatatgggggatttggatccctactcaggggtccgatttgtatacgtggaagtcctagaccttccaggggggtccagactacgtacatgtgggtccagacccattggtgaagtccctaatcatatagccttcctggacacgttgcagcaccaaactagacatgatcatgggccacccgacctggtcaacccgcccgaaaaaaacctggttcgacccaaccaatacagcgggcgggtacgggccacaatttttgacctgtaataattcacgggccggttacgggccgtgatttttgacccaaaacccgacccaacccgagaaaacacaacacaaagccaaaaaaacacgtcccaacctggaaaaaatccaactcgacatgtcaaacagggaggcacgggccgacccgacccgacactaggcacgagtcgggtacgggccgtaataaatggcccatgacccagccttgacccgacccgaactcgaccagatgtttgaagaggtctacaccagatctacccataaggcggggacatacactttagacgccctcgggcaaatcgaaaaatgcgcttctcacccgaggctggcctcgggtgagtcgggaatgcgcttctcgcccgaggccagcctcgggcgagtcgcgactgcgtctccaaccctgggttggcctcgggcgagtcgtgattgcgtctcccacccgaggttggcctcgggtgagtcgcaactacgtcccctgcccggagtcaacctcgggtgagtcgtaattgtatctcccgcccgaggttggcctcgctcgaggcgtgactatgtcttccgctcgtggttggcctcgagcgagtcgtgactgtgtctcccgcccaatgttggcctcgatcgaggcgtggctgtgtcttccgctcgtggttggcctcaagcgagtcgtgactgtgtctcccgcctgaggttggcctcgggtgagttgtgacttaggtcaagctactcagttccttagcacacgattagagataatcgtgtgggtactgcgttttgatactgtagtaaagggtaccccgttctgtggtaccaatgtacatgctttaggttaatgtttggttgatgtatttcggtattttcaagtataatgacaacaagtaaaaagtttttgcattttagtcgatgttcaagatatcagatattgaataatcgattagctagacatgagtgatcaatcaattatatgggattaattaaaaataatcagtacgcactaatcggcaaaatagtagtgcaaatatgcaatgtaagaaattaagatataaaatagagacatctaaccgttatcgatcttaattgtcttgctcataatcttttgttgggagcactttgtcgtggtctgcttcaaactcaatatcctcatcttctattttgatgtctccgcatttgctatcagacttgaaattatcttcatgaagttctctaacttttgaacttctacgaggttgcctatggtagatcctcccaagttatatggcccacatgcacctgtctttatcttaaagacctcagacaactatgcatgtgtaccagataacttagaagaaatccgtctgagtatcccggaggaccttggaaaatccatttacaaccaagatcggagggttaagtaaacacaaatcacatatcgaagttcacagcagaattaatattacaaacagtttacaaatatcaatttaagagtgaatacaaagttgatttgtaagtaatacaactttgaaaaaaatgaatacaattataaatttgaaatacattgctagctcaaatgacaatcctcaggatgaagtacagaagagatacttatataagaaggctgagcccaccagcacttagctactatctacagcataataagtctttatctacaacaacacggtgggataaaaccctgagtatacaaatactctgcgagacttacctaactaaagaaaaactccaagggtatactggttttggggactcaaggtaagattaagcaagaatcaaagtctcttatgcagaaaagcttacttaaaaataaatccttaagccatattttagattataaagttaagtactttcataaatctagattaacctgatctagatcaatcacttgtccttcactaacttcattttaccatatcttgttccacttcttaaactacaatgcagagtagtgatccaatcttcatatcggggaagtaacgatgatccgaatagattaatacacagttgtgaatatatgtagcacttaactcttgcatatgtcaacacatctttggataatttaagatcataatgatttcacgccagccgagagtacaatactccaccctctagcctatagtcaggataaatacacgctactctcgtagtatcttcacttccagtgcatggtagctgttctaccggagtgctatggtaggactgacgagtgacgaccacctatagtctgatcaatagtaagttccatcaccaatagctaatacaatggtagatataaatccacacagtaaccagccatcgtcacagcacactgctgcatagtgcaggtcgccacaactcttctaattttctttgttgttgctgagatggcgacctccagggccacgaaaaaactggactattttgcccacgcctcttggtacccattttccctttgcttttctataaaaccaggcgaggcgccacaaggccggagcccacgtcccacccctcctgcatttcaaaataatatctccctgcgcttttcctagccctttgtcatccaaggatacaataaacaaccggcgcttttacacccccgccaagaacaggagcaacaacaataaggctcctcgcaacaatccattctcatcc

SEQ ID NO: 183 - DNA, 3000 bp, Zea mays
gtggttaaaggcgaaagggggaggcgatgtctgcatccttcagatagtagcaaatgttcagtctgtgacacccggattcccctagccaagcagggcaatgcagagtccctagcctcatcatccccccaagtcctgctgtatgagtgcttagctactgaggtgtaatctggagttgacgagggacttacagctcccagggacgggcgtgtgatccacctgggaccgggggagttgaacgcacgcacggcgggtgggagagtgtggacagcgcgccgcacccgtcgatcggatctgtgcatggcggcggcaatggcgaggagatccgaggaggagcaggcgggatcaaggcggtggcgctcgtgcccctccggtctcgcttcgggctggttcacgggcggctgcgggcgtgcggtcgggctggttcgggagcgactgcgtgcggcatgcgtcaggcgggcgggagggcggttcgcggcggccgcagcgagatttgtgggattacggcgtgcgagcggttcggtgggcgggagggcggttcggcggggacagtctacgttagactcttaatagtagtagagattttcactatagaagcttggctatcaattctggccacacacacaaaaatcggaaactcattggcctataagcaagcaagcaaccgacagcaggaaatcttgaaacatttcagtgctcttgatgcatctatcgaataagccatttggtggcaaagccactatgatgcttgagaatctaagattcctgataagcctgagcaccaaatgcacgcaacgcacaccaccgtcactggaattccaagtaaaggacagagacatgtggtggctcggcagcagccaggaggccagatgcatgcaccggcccggcccagcgtgtgtgatagatagcggattacggcggacgacgtgtccgtgtccgtcccgttcccgtccatcacaaaatatctggcgcctgctgctgtctgctgacctggtaggcctcccagccagggcaaaggtacggtgggcccctgccgaaaaaatccacatttcgtggacctaaacgcccccaccgggcccagcggcggcccagtaggtgcgattagcccgcccacttgacctgcaacttgggggtccgccctgatattttcgcgatgtgaacagggagaaaatggaatggacaaactgacagcgacaccttgtgcttgacttgtcaagctgaactatgagatcttcttagcgtctctgtgtcatggctcaagcttctttaaaaataactttagctttggattcttttcaagagtagttcctctataggagctagtgcttttttaacaaatcgtttgacaaaacgatttttttggcgatgagagaacgacaagataggggagtgaggagaggaggcgataagagccttttttgctccggttatctctatataaatggctccgactcatcagtactatttgtcgcgagctcttttttaaaccgtttgagagggctcctctagaaaccggagccatagccggtttgagaggcatcccaaataggcacttagttcttagaccgtctctatatttcttttcgatatctgtttttataaacttctataaaaagttctcctctatttatcatgccctcaaatatcttatgcatattctagttttgtttagtagagaagaaaaggggaagtatctatacatacacggtatagaggatgaatgaatattctctcgttaaaggctatatagaagagaaacttctctatatttgggatacatgagcatagtctttcgttgaagacacacttacttttcctccattttaaatcatactaagctaaactatgtacacaagatttaaagggacatggtagttctagttattatcggtgtcctagataaattataggacaaaatgaacatgagttttgtctgcattagttagacctaaaatttagttagagttggctaacaattagttaaataaatgactaaaaattaaatccacctattataccgtgcttggttgagctagtaaaaatagctagctaacaattagtcttatatatatctatatagctctagattcttaacatcgagtcgccgcaaaaagaatcaacaagcgcacgatgttaacttcctccgagtgtggatcacaacaattttatttctattttttgagaccatatgttagtactatggcactcacaatcatatattctatgtacaagttgcattcaatatgaacttacaaaagttgatagatgtgttagggtgaacttatggatttccacttggccttcaagttaaggtcctgattttttataaatagggagaatgaaatgaaaattgttagatataccttttcttatggcttccatatcgatgcaatccataattatagggtgtgtattttactaaagtcatgacataggaaaattacatagcacccgtctcttctgtatcatttgtccacctatgaaacttataattctactcgtacaaaataactagaaaagtttaatatatttagaatctaaatttagttaaagtagagaaccttaggattatctctattatataagcatacatatctatacttttaacattaaggggtgtttgatttatagggactaatttttagttccatcattttattttattttagtacctaaattactaaatatagaaactgtaattctattttagtttttatatttatgaatttatgactaaaatagaataaaataaatttagccccatagaaaccaaacacactataatacaggataatgaaatgagaaacaaaagcaagggtgtttcccggaaaagaccaacagtgtcgccactcgccacagagcgctccatcaacacgaccgccggtataaacgcagcccccctccggcctccaccaaggccaacattgctcaggctgctcccaactcccatcctccccctcccggagtacgaagtactagaaagagagcggctttcctctaaga

SEQ ID NO: 184 - DNA, 489 bp, Zea mays
atggcggccgtctcctccacctccaccgcctcctcctacttctcctcgcagccgcagctgccgatctccaccgccgaccctgccgccagcaaaagtaggttgatgcggcagccacggcggagcagcagcttcgtgatgatggaggcgtcctctgccagcggcagcgacggcggggtggccaggacgaagagcctcacggaggacgacctggaggagctcaagggctgcctcgacctcggcttcggattcgcgtacagcgagatacccgagctctgcgggacgctgcccgcgctcgaactctgctactccatgacccggaggttcctcgacgagcagaaggcgccggggcaggaggaggagttggagcctgcgtcgccgccgctccccaattggaggatctctggcccgggtgacgatccagaagaagtgaaggcgaggttgaagtattgggctcaagctgttgcatgcactgtcaagctctgcagctaa

SEQ ID NO: 185 - protein, 162 aa, Zea mays
MAAVSSTSTASSYFSSQPQLPISTADPAASKSRLMRQPRRSSSFVMMEASSASGSDGGVARTKSLTEDDLEELKGCLDLGFGFAYSEIPELCGTLPALELCYSMTRRFLDEQKAPGQEEELEPASPPLPNWRISGPGDDPEEVKARLKYWAQAVACTVKLCS

SEQ ID NO: 186 - DNA, 1041 bp, Zea mays
atggcgggagaggaggccgggaggaggggcgttccctctctgctgaacccgccgtccgcttccagcgaggggcagcaggagcacatcgcctctgatgtcacacagctcatcggatggacacctctggtcgagctcaagcgaatcgccgccaaggaaggggtatgcgcgcgcatcgtcggcaaggtggaggcgtaccagcctctgtgctccgtcaaggatcgcagcgctctgagaatgatcgaagacgcagaggagagggggctgatctcgcccggcaccacgacgctcgtggagccgacgagcggcaacctggggctgggcctggtcctcgtcgccctccgcaagggctacaggttcgtcgcggtcatgccaggccagtactcgctcgacaagcagatcctgctgacatacatgggcgcagagctgtacgtaacagatccatccctggggttcccgggcataaccgccaaggtcgaggagctcaagaaggagctgcccaacgtgcacgtcctcgaccagttctccaacagagcgaatcctgaagcgcatgttagatggactgggcctgagatctggaaggacaccgccggtaaggtggacatattcgtggccggttcaggctcgggaggcacggtgtctggcgtcggcaagtacctcaagacgcagaaccccagcgtcaaggtcatctgcgttgagcctgccgagagcccagttgtttcaggcggggaaccaggcagccacaagatccagggaatagggccgggattcataccggaagtgctggacacctcggtcatcgacgaggccgtcacggtgaccaccgaggaggcgatggcgggcgcccggaggctggccagggaggagggcctgctcgtcggcatctcttccggggccaacctggcggcctgcttgaaggtcgcggcgcgagaagagagcaaggggaagatgattgtcaccgtgtttccgagcgggggcgagaggtacatgacctccgacctgttcgccgccgccagagaggagtgtattgccatgacgttttga

SEQ ID NO: 187 - protein, 346 aa, Zea mays
MAGEEAGRRGVPSLLNPPSASSEGQQEHIASDVTQLIGWTPLVELKRIAAKEGVCARIVGKVEAYQPLCSVKDRSALRMIEDAEERGLISPGTTTLVEPTSGNLGLGLVLVALRKGYRFVAVMPGQYSLDKQILLTYMGAELYVTDPSLGFPGITAKVEELKKELPNVHVLDQFSNRANPEAHVRWTGPEIWKDTAGKVDIFVAGSGSGGTVSGVGKYLKTQNPSVKVICVEPAESPVVSGGEPGSHKIQGIGPGFIPEVLDTSVIDEAVTVTTEEAMAGARRLAREEGLLVGISSGANLAACLKVAAREESKGKMIVTVFPSGGERYMTSDLFAAAREECIAMTF

SEQ ID NO: 188 - DNA, 474 bp, Zea mays
atggccgccacggcgtactccaccgcgctccccggcggggcgcgcctccccgctgccggagccgccgcaccgccctctgccctcctcctcccgcggcgtaataaactgtctccgctccctctccggctccaagatgcgccgaggctgtcgttgctccgggtgaaggcctcctccgacgactcctcggccgcgagcggggacgagctcatcgccgacttgaaagccaagtgggacgccgtcgagaacaagagcactgtcctcacctacgccggcggcgctgtcgtcgctctctggctgacgtccgtcatcgtcggcgccatcaactccgtgcctctgctccccaagatcatggagcttgtcggcctcggctacaccggatggttcgtctaccgctaccttctcttcaaggaaagcaggaaagagctcgccgacgacatcgagtcgctcaagaaaaaaattgctgggacagagtaa

SEQ ID NO: 189 - protein, 157 aa, Zea mays
MAATAYSTALPGGARLPAAGAAAPPSALLLPRRNKLSPLPLRLQDAPRLSLLRVKASSDDSSAASGDELIADLKAKWDAVENKSTVLTYAGGAVVALWLTSVIVGAINSVPLLPKIMELVGLGYTGWFVYRYLLFKESRKELADDIESLKKKIAGTE

SEQ ID NO: 190 - DNA, 618 bp, Zea mays
atgcggacgatctgcgatgtgtgcgagagcgcaccggcggtgctcttctgtgcggccgacgaggctgcgctttgccggccttgcgacgagaaggtacacatgtgcaacaagcttgctagtcggcatgtgagagttgggcttgcagaccctaataaactggcacgttgtgatatatgcgagaattcacctgctttcttctactgtgagatagatggcacctcactttgcctgagctgtgatatgactgttcatgttggtggcaaaagaacccatggtagatacctgctcctaaggcaaagggttgaatttccaggagataaaccgggccatatggatgacgtgcctatggagatcaaagatcctgaaaaccagagagagcaaaacacgcccaaggagcaaatggcaaaccaccataacgtcaatgatccagtctctgatggcaattgcgatggccagggtaacattgattcgaaaatgatcgatcttaatatgcgcccggctcgtactcatgggcaaggatcaaattcccagactcagggggtggatcttagtgtgaacaaccatgactctccaggggtggtgccaacaagtaattccgaaagagacgccatcaagtaa

SEQ ID NO: 191 - protein, 205 aa, Zea mays
MRTICDVCESAPAVLFCAADEAALCRPCDEKVHMCNKLASRHVRVGLADPNKLARCDICENSPAFFYCEIDGTSLCLSCDMTVHVGGKRTHGRYLLLRQRVEFPGDKPGHMDDVPMEIKDPENQREQNTPKEQMANHHNVNDPVSDGNCDGQGNIDSKMIDLNMRPARTHGQGSNSQTQGVDLSVNNHDSPGVVPTSNSERDAIK

SEQ ID NO: 192 - DNA, 1464 bp, Zea mays
atggatcccaatggcctcaaaactggaggccttttgctcccgaccatcgagaggcggtgcacgtcgcctccatccgtcattgtcatcggcggtggcatctcgggcgttgcagctgcccgtgccctctccaattcttcatttaaggtgactgttttggaatcgagagatcgtattggcgggcgcattcatactgataactcgtttggatgcccaattgatatgggagcctcatggctacacggcgtgtgcaatgagaatccactggcaccattgataagctatcttgggctgaggttataccgcacaagcgatgataactcagttctgtatgatcatgatttagaaagctatgctctctttgataaggatggtaatcaggtcccaaaggagacagtcgataaagttggagaaacattcgagagaattcttgaagagacggtgaaagtgcgcgatgagcaggaacacgacatgccactgctacaggcaatttctattgtgtttgagaggcacccccatctaaagcttgaagggctagatgatcaggtcttacaatggtgtgtctgccggcttgaggcatggtttgctgcagatgcagatgaaatatctctgaagaactgggatcaggagcgtgttcttactggtggacatggactgatggtaaatgggtactatcctgttattgaagctcttgctcaaggtcttgacatcaggcttaaccaaagggtcaccgaaattacccgccagcacaatggagtcaaggtcactactgaagatggcacaagctacttggccgacgcctgcataatctcagtgccactcggcgtgctcaaggcgaacgtaataaagttcgagcctgagctgccccagtggaagagctccgccatcgccgacctcggcgtgggcaccgagaacaagatcgccatgcacttcgacagggtcttttggcccaacgtcgaggtgctgggaatggtcgggccgacgcccaaagcctgtgggtacttcctgaacctgcacaaagccaccggcaatccggtcctcgtgtacatggccgccggaaggttcgcccaggaggtggagaagctgtcggacaaggaagccgtcggcctggtcgtttctcacctgaagaagatgctcccggatgccactgaaccgacgcagtacctggtgtcgcgatggggctccgaccccaactccctggggtcctactcgtgcgacctggtcgcgaagccggccgacgtgtgcgcgaggttcgccgcccccgtcgagaacctgcacttcgccggcgaggcggccagtgccgagcactcggggtccgtgcacggcgcctactcgtcgggcatcgccgctgccgaggaatgcaggaagcggctcctggcgctgaagggcatcccggacctggtccaggtcgcggcgtgggaggagatggccggagctgtggctcctctgcagatttgcaggacctga

SEQ ID NO: 193 - protein, 487 aa, Zea mays
MDPNGLKTGGLLLPTIERRCTSPPSVIVIGGGISGVAAARALSNSSFKVTVLESRDRIGGRIHTDNSFGCPIDMGASWLHGVCNENPLAPLISYLGLRLYRTSDDNSVLYDHDLESYALFDKDGNQVPKETVDKVGETFERILEETVKVRDEQEHDMPLLQAISIVFERHPHLKLEGLDDQVLQWCVCRLEAWFAADADEISLKNWDQERVLTGGHGLMVNGYYPVIEALAQGLDIRLNQRVTEITRQHNGVKVTTEDGTSYLADACIISVPLGVLKANVIKFEPELPQWKSSAIADLGVGTENKIAMHFDRVFWPNVEVLGMVGPTPKACGYFLNLHKATGNPVLVYMAAGRFAQEVEKLSDKEAVGLVVSHLKKMLPDATEPTQYLVSRWGSDPNSLGSYSCDLVAKPADVCARFAAPVENLHFAGEAASAEHSGSVHGAYSSGIAAAEECRKRLLALKGIPDLVQVAAWEEMAGAVAPLQICRT

SEQ ID NO: 194 - DNA, 1047 bp, Zea mays
atgcgcgaggagggaccgtggggaccaccaccaccagcaccaccacctccatccgtgcgcctctcgctctcgctggtggtgctcctcctcctcctcctgctcccggggcgggcggcctccttttccacctcctgctggtgccagggccgggagggcgtcgcggaggtggcgcgcatggggctcgccggggacgggtcggcggacaccgcccacctcagtaataatgaaaatgggcggttcatttatggagttgcgagttctcctggtaaaagagcatcgatggaggacttctatgaggcaagaatagacgacgttgatggagagaaaattggaatgttcggtgtatatgatggtcatggaggagtccgagcagctgagtatgttaagcagcaccttttcagcaatttaatcaaacacccaaagttcatcactgataccaaggctgctatcgccgaaacttacaacctcacagattcagaatttctgaaagctgatagctgtcaaactcgagatgctggctcaactgcctcaacagctattattgtaggtgaccgtttgcttgttgcaaatgttggagattctagagccgttatttctaaaggaggacaagcgattgcggtttcaagggatcacaaacctgatcagacagatgagagacaaagaattgaggacgcagggggctttgttatgtgggctgggacatggcgagtgggtggtgttcttgctgtctctcgcgcatttggtgataaactcttgaagcagtatgttgtcgctgaccctgaaatcaaggaggaggtggtcgacagctcccttgaattcctcatccttgctagtgatggactctgggatgttgtcactaatgaggaagctgttgccatggtcaagcctattcaggacccccaggaagcagcaaacaagcttctcgaagaagcgtcccgaaggggaagctctgataacatcaccgttgtcatcgtccgcttcctatatggaactaccggtgataaatcaggcgcagacaaagagaccaccaatgaccaaaactcctaa

SEQ ID NO: 195 - protein, 348 aa, Zea mays
MREEGPWGPPPPAPPPPSVRLSLSLVVLLLLLLLPGRAASFSTSCWCQGREGVAEVARMGLAGDGSADTAHLSNNENGRFIYGVASSPGKRASMEDFYEARIDDVDGEKIGMFGVYDGHGGVRAAEYVKQHLFSNLIKHPKFITDTKAAIAETYNLTDSEFLKADSCQTRDAGSTASTAIIVGDRLLVANVGDSRAVISKGGQAIAVSRDHKPDQTDERQRIEDAGGFVMWAGTWRVGGVLAVSRAFGDKLLKQYVVADPEIKEEVVDSSLEFLILASDGLWDVVTNEEAVAMVKPIQDPQEAANKLLEEASRRGSSDNITVVIVRFLYGTTGDKSGADKETTNDQNS

SEQ ID NO: 196 - DNA, 2043 bp, Zea mays
atgaaatggaaaaatgttttgaaggaaatggcaccgctgaggtccacaggcagattctttcaacgccatccttcagctatctgcttactgattttcctacttgtgttgtacaagtacttcttcggctggttcaccctcatcgtcaccacatcacctatcttcctaatcgctggcatctttcttggaatcgtcctggtgtacggtgaaccgaacaaccctgaaaaagatcatgtctacaaaaaaaatgataatactcggagtttgaatatccatgatagcagcaaatctattaggggtgtacctcttcctagaattccgtctggtgaagagagagcgccgaagcacaaaaacagtgttaagaaaattaggaagcagtctcgtggtgtagcctcttcttctgaaccaggatcaagtgaatcaggtggttcagatactgatattgctccaatgctccatgcatttcatcatcttaggtcgggcagcaattcgtcaaattcctctcaagatggtgactctgacagtagcaccgaagatacaacagagaatcaacagggcaacgacggcaggatatcccgcgaggggaaacaacatgttaaagttgttgcatggactgctgatgaccagaagaacataataaaaatcgggtgcttggagattgagcgtaaccaaaggttggagaccctaattgctaggcgtcgggcaaggaaatacgcagacaggaacttggcagagtttggcagcactgattccttacccactattgaagagctatcaaagttcaatgttcaaattcctgctgtttttgctcctaggaaaaatccttttgatcttccttacaatgaagataacttcccagattctgctccatctgcagtgttggaaacgagatacccatttgatctaccaagtgagcaagcaaacgagagcagctcttatggagccaactcaagccatgatgaacctattcccgtagcatgtcatttacagagtgcactgttgaggaggcatgagagcttcactgaaggagcaccattccttagtgactttttgcaagatacacagccttcccgattcagaccatacttcatgacggaaaaaatggctaacgaggaaatgacagatccagttcttgaaggagaaactagtgaaaagagcaactctaaggccagctctgctcaagactcggatagtacttcttcagttgctgaccaagaaagccagaaggatgttctagaggattgctcaaaccaaggacaacaatcttctttcagtcaaacagaggaacatgcacatatagctcggcatgcaagggaggtttctctttcccttgacatggaaccacctgtcttaattagtgattcctctgatgatgacatatcactgtctggtgaacatataaatgattgggaggaagcacaacagagtgaaaattttagtttgtcccagaatacatggcaagaggatcctaatgtcatgcaacaccatcaagaaatagatatcacaagcaatggattgaatcaaatgtcaccacattcgaatgatcttgagttgacgtcgtcatcaactgaaactactgatgatccttttgaagtgaatgacattgaaccaccagctaaggaagtggtggtcgttgatgatacccacgttgtggatcctgtatatgattcaagtccttcgggaagcgagaggcctgcacatactggtttagtaattgacggacctgtcctaaaagatggtcatgcttgtactcttgttgttgaagcaaccatcgaagaagggggttcatcatcaagaatggaggtttcttccagtgaggtagctggacctagtttgagttctgtggagcaaagcgaatccccagagaaagaagcctctgagataagagagcagtccatggttggccatgtcgaagcacatggaggttctgtcagccatgctgatccttcagtatctgatataagttctcagccgagtactgaaagttcaacaaatggtgattctggcagtggtgtaacaccatccttcacaaacgcagttctttag

SEQ ID NO: 197 - protein, 680 aa, Zea mays
MKWKNVLKEMAPLRSTGRFFQRHPSAICLLIFLLVLYKYFFGWFTLIVTTSPIFLIAGIFLGIVLVYGEPNNPEKDHVYKKNDNTRSLNIHDSSKSIRGVPLPRIPSGEERAPKHKNSVKKIRKQSRGVASSSEPGSSESGGSDTDIAPMLHAFHHLRSGSNSSNSSQDGDSDSSTEDTTENQQGNDGRISREGKQHVKVVAWTADDQKNIIKIGCLEIERNQRLETLIARRRARKYADRNLAEFGSTDSLPTIEELSKFNVQIPAVFAPRKNPFDLPYNEDNFPDSAPSAVLETRYPFDLPSEQANESSSYGANSSHDEPIPVACHLQSALLRRHESFTEGAPFLSDFLQDTQPSRFRPYFMTEKMANEEMTDPVLEGETSEKSNSKASSAQDSDSTSSVADQESQKDVLEDCSNQGQQSSFSQTEEHAHIARHAREVSLSLDMEPPVLISDSSDDDISLSGEHINDWEEAQQSENFSLSQNTWQEDPNVMQHHQEIDITSNGLNQMSPHSNDLELTSSSTETTDDPFEVNDIEPPAKEVVVVDDTHVVDPVYDSSPSGSERPAHTGLVIDGPVLKDGHACTLVVEATIEEGGSSSRMEVSSSEVAGPSLSSVEQSESPEKEASEIREQSMVGHVEAHGGSVSHADPSVSDISSQPSTESSTNGDSGSGVTPSFTNAVL

SEQ ID NO: 198 - DNA, 1494 bp, Zea mays
atgggcttccaggtggctgccgtggcaccgccgccgtgcgcgcgctcctcctccgccttatcgtcgccctcgacctcctcgcggccgttgcccgccttcctcggaggcggcggcggatgcgccgggctcgcgagatcccgggcacccgtaaactggggaaccggcgtgatggtgcggcgcccgcgcccggctcggacgccagcgaggtgcgcgctgagcgcgagtttggatgggatgggtggcggggacgcggagttcatgaagaggatcgaggagctcgctgcggcggctggggtgcagccggccggcccggcgggttgcggctggcccgcgagcgtggagctgagcgcgagcaacgtcgggctgccgctgtcgctgcggatgctgaagcggaaaaagcagcaacagcaggcgcagctgcatgctgtagcgcgtccttcacgctgggacgatgggctgctgggctccgccggggagtcggtgggccgcgccttctcctccatggtgctcatcgtgcgggagctgcagagcttcgcgctgcagcagatgcgcgacgcgctgctctgcgacgacctgcagggcgtcctggcgcgtgtgcagggcgagatgcacgactccttcgtctggctcttccagcatatcttcgcgggcacgccggcgttcatggtctccctcatgctcctcctcgccaacttcaccgtccaatcgatgggccgcagcgtcgccgctgcggccgccaccatcccgcctactgcgcctgctgtcgcccttgtcaacgcccagcgccccgagccgtcacgtccgcggttcgacgcggcttcggtgaagacgttctccgtcgaccggatggcctcggtcgggggggacatcggcggtggcggcaagaccccgcctgtcgcgggtgccaccggcgacggccggtcggacgagtccttatatcggctaagccgtgtgtcgccgcagcagccgtcggcaccccctgtggctgaggtcgcccaagacgctgcggacgcggacgagcaggccatttgggaaatgatgctcgcggaggccctgaaggccagcccgcgcaccgaggagctgagcgatccggacgtgctcagaagcctcgtcgcgccggtggaggcggagctggagaccgaggaccacgccgagcacacgctgacggagcagagatacgagcaggccgtcgccgctgagcccaacaatccgctcatcctcgccaacttcgcgcagttcctctacctcgtgcagaacgaccacgaccgggcggagcactacttcgagagagcagtgcgcgctgagccggcggactcggaggcgctgagccggtacgctactttcctatggaaggcgcggaacgacctcgccggcgcggaggacacctaccaggaggccatcgcggccgatcccgggaacgcccaccacgccgcggcctacgcgcacttcctctggaacaccggaggtgaggacacatgctacccactcgattga

SEQ ID NO: 199 - protein, 497 aa, Zea mays
MGFQVAAVAPPPCARSSSALSSPSTSSRPLPAFLGGGGGCAGLARSRAPVNWGTGVMVRRPRPARTPARCALSASLDGMGGGDAEFMKRIEELAAAAGVQPAGPAGCGWPASVELSASNVGLPLSLRMLKRKKQQQQAQLHAVARPSRWDDGLLGSAGESVGRAFSSMVLIVRELQSFALQQMRDALLCDDLQGVLARVQGEMHDSFVWLFQHIFAGTPAFMVSLMLLLANFTVQSMGRSVAAAAATIPPTAPAVALVNAQRPEPSRPRFDAASVKTFSVDRMASVGGDIGGGGKTPPVAGATGDGRSDESLYRLSRVSPQQPSAPPVAEVAQDAADADEQAIWEMMLAEALKASPRTEELSDPDVLRSLVAPVEAELETEDHAEHTLTEQRYEQAVAAEPNNPLILANFAQFLYLVQNDHDRAEHYFERAVRAEPADSEALSRYATFLWKARNDLAGAEDTYQEAIAADPGNAHHAAAYAHFLWNTGGEDTCYPLD

SEQ ID NO: 200 - DNA, 753 bp, Zea mays
atggccgcctccgcgctcctcctctcgccgcggctcgtgtctttcccgcctcacccgagcctcgccccactcttcaccaagagaccaccgccctaccccctcggcggcgccggcgcgaggctccgggccgtcggggacgggcccggcgcggggctgccacccgagcaggccacggtctacgacggcgcctacggtccctggaccctggaggactccgacgtgcgcgaggtcctgctgtaccggtcggggctggtgacggctgcggcgtccttcgtggcggcgtcctccgcggcgttcctgccggaagggaaccccgccgcctccgccgtcaccggcgccgccgacctcctgtacgccgccggcgccgcggggctggggctgtcgctggtcctcatccacatctacgtcaccccgataaagcgcttcctccaggcgctgtgggcggccggggcgctcggctccgtcgggacctacctcgtcgccgcccgcccgctggatgagggcctcgtgcagtacgtgctggaccaccccgccgcgctgtggttcgtcggccccacgttcgccgcgctcactggcctcgtcttcaaggaaggtctctgctatgggaaactggaagctggcatcttgacgtttcttatccctgggcttcttcttgggcatttggtaactcagaaaccaaccactagcatttatctcctcaaactgttggtatctgcttctgttgtcttacaatctttgtgcagtctggtttaa

SEQ ID NO: 201 - protein, 250 aa, Zea mays
MAASALLLSPRLVSFPPHPSLAPLFTKRPPPYPLGGAGARLRAVGDGPGAGLPPEQATVYDGAYGPWTLEDSDVREVLLYRSGLVTAAASFVAASSAAFLPEGNPAASAVTGAADLLYAAGAAGLGLSLVLIHIYVTPIKRFLQALWAAGALGSVGTYLVAARPLDEGLVQYVLDHPAALWFVGPTFAALTGLVFKEGLCYGKLEAGILTFLIPGLLLGHLVTQKPTTSIYLLKLLVSASVVLQSLCSLV

SEQ ID NO: 202 - DNA, 912 bp, Zea mays
atggctgcagcggcggcgtggaccggcgccgcatcccccaactcgctgctgctctcgcgctcgcctccccacgccgccgcgctcgcgccttcgccgggaagctccatgcggaggcggctcctcctcggcgtcggcaccccggccgtggcggcgctggcggccgcggcgccgccagcggtgctgcaggacggagcggtcactgtgctcatcaccgccggcgcctactctcttgtgcgcgtcttcgacgagctcaccgagcggcggctcatcgaaaagagcttgagcaggaaggttgtgcacgtgctatccggcgtcctgttcatgtcatcttggcccctgttcagcaattcgacagaagcacggtatttcgccgcggttgtcccgttcctgaactccatgaggcttctgatatatggactccgtctctacactgatgaagctctggtaaaatcagtgacacgtgaaggaaaaccagaggaattgctgagaggtccactctattatgtcctggtgctgctgttcagcgttttagtcttctggcgtgagtcccccatcgggatcgtctccttgtcgatgatgagcggtggcgatggttttgctgacattgttgggaggaggtatggctcagcgaagctgccattcaatcggaagaagagctgggccgggagcatctcgatgttcatttctggtttcctgctgtccgcgatgatgatgctctacttctcaagcctgggttacattgatgttatctgggaagaggcacttggtaagctggcgcttgttgcactagcagcgacagtagtggagtgcgttcctgtgaccgaagttgtagatgacaacatatctgttcctttggccaccatgctggtagcttttctcttgtttagctccaaccgcacaatagttaattaa

SEQ ID NO: 203 - protein, 303 aa, Zea mays
MAAAAAWTGAASPNSLLLSRSPPHAAALAPSPGSSMRRRLLLGVGTPAVAALAAAAPPAVLQDGAVTVLITAGAYSLVRVFDELTERRLIEKSLSRKVVHVLSGVLFMSSWPLFSNSTEARYFAAVVPFLNSMRLLIYGLRLYTDEALVKSVTREGKPEELLRGPLYYVLVLLFSVLVFWRESPIGIVSLSMMSGGDGFADIVGRRYGSAKLPFNRKKSWAGSISMFISGFLLSAMMMLYFSSLGYIDVIWEEALGKLALVALAATVVECVPVTEVVDDNISVPLATMLVAFLLFSSNRTIVN

SEQ ID NO: 204 - DNA, 780 bp, Zea mays
atgaagatccagtgcgacgcgtgcgagggcgcggctgccacggtggtgtgctgcgccgacgaggccgcgctgtgcgcgcgctgcgacgtcgagatccacgccgccaacaagctcgcgagcaagcaccagcgcctcccgctcgaggcgctctccgccaagctcccgcgctgcgacgtctgccaggagaaagcggcgttcatcttctgcgtggaggaccgggcgctcttctgccaggactgcgacgagcccatccacgtcccgggcacgctctccgggaaccaccagcgctacctggccaccggcatccgcgtcggcctcgcctcggcttccgcctgcagcgacgcctgcgacgcccacgactccgaccaccacgccccgcccaaggccaccatcgagcaccgcacgccgccgtctccgccgcggtgcagcaggtgccctcgcccgcagttcctgccgcagggctgggccgtcgacgagctcctgcagttctccgactacgagtccagcgacaagttgcagctgcacaaggagccgacgctcgggttcaaggagctggagtggttcgccgacatcgacctcttccacgagcaggcgcccaaagccagcaggacgttggcggaggtgccggagcttttcggataccaggcggcgaacgacgcggcgtactacaggccggccaaagccgccgccggcggcggcgctggggttcgccagagcaagaaggcccggatcgaggtcaccgacgacgaggattacctcatagtccctgatcttggttaa

SEQ ID NO: 205 - protein, 259 aa, Zea mays
MKIQCDACEGAAATVVCCADEAALCARCDVEIHAANKLASKHQRLPLEALSAKLPRCDVCQEKAAFIFCVEDRALFCQDCDEPIHVPGTLSGNHQRYLATGIRVGLASASACSDACDAHDSDHHAPPKATIEHRTPPSPPRCSRCPRPQFLPQGWAVDELLQFSDYESSDKLQLHKEPTLGFKELEWFADIDLFHEQAPKASRTLAEVPELFGYQAANDAAYYRPAKAAAGGGAGVRQSKKARIEVTDDEDYLIVPDLG

SEQ ID NO: 206 - DNA, 2088 bp, Zea mays
atgtctcccgacgccgacgccgccgccgggggaggaggaggtggagaggcgagcgccggcgccggcgccggcgcgtcgtcgcctcccgcgtccgcgtccgcggcggcgaacggccgggcgctggtgcggtgggaccagatcctgccgcgccgctccctgcgggtgcttctcgtcgagcacgacgactccacgcgccagatcgtcaccgcgctcctccgcaagtgcggctaccgcgtggccgcggtcgcggacgggatgaaggcgtgggaggtcatgcgggagcgtgcctacgacttcgacctcgtcctcaccgaggtcgccatgccctccctctccggcatccagctgctctccaggatcgccgccgccgccgagtgcaagaacatccccgtcatcatgatgtcatcccaagattctattggcacggtgctcaagtgtatgcagaagggtgcggtggacttccttgtgaaaccagtaagaaagaatgagctgggtaacctgtggcaacatgtgtggaggaggcatgcaatgaattgccagacaaatggatcagaaaataatgcagccagcaatcatgtaagtaccaatgttgctaatgggtcaaagacaggagaaaacaatgatgaggaaagtgatgcccaaagctttggtaacaaaagggagactgaaattaagagtgctgagacgttaccagatattcgtagagatgaaatggctggctcatccaaaaaaattgaactacaaaataagtctaatgatggagtaaacacaaaagtggatgcgtcaaaagatagcgatggtgctccaagtgaaagtgagaagaatgtgcgttccaaatgccttaatggtattacttctgcaaaggtggctgagcaaataatggataatgccttgaggatcacggatgcaagttcacgtcgtccaaccaatcttggcaaagatttggctatgactgaaccagcagctgatagaaaatgccaatctttagtgatggaaaataatgctgtcaaagaaaagaaccctggtgaaaagtcgaagagtgctgtaataggtcatgctgattcttacccctcccaatttctcgagaccaacttgggaaaacaacagtatcgtaatggttacaagaatcaagaattcagggaaaaagatatctttaatcactcgaattcttctgccttctcgagatatggcaatagaaggatagaatcatcaggtgagatacagtttcttccttctcgttgcattgttgggcaagagcagcatgttcatggcaaggacccagttttccaacccaatggggtcttgctgcctcccaatgaccataatacaggtgagagtacaaggcaagctcgaattactctggacagtagcatggagggtgctgacatcatttgctccagtagtgctagggaagatgctggtgcaagtagttcttcccatagaaaggacagtatgagccatccctcatatgggtttgtacctgttccaattcctgtcggtgccatgatgccctatcattgtggtgcaattctgcagccagtatactacccacagggtccacttatgcactgtaattcatctgcaatcaacaaggcaacaattcatcaaacctctggccaatctaactaccgtgaagattgtggtagtggtagaccatctcaggttgatgaacacaaacagtcagaggaaaagcaccagttgcatcattcaagacaaattcatcgggaatcaggacaaccagttgacatggttagagctcacatggatcatgctaaccagagtgcaagctgcagccgggatatctgtaaaggaagcggatgcacgggtagcggtgaagccgataccaatgcgaacacgacggttgccctagagagtggcaacgagagtggcatccaaaatagtgacaggtctcaccgagaagctgctttgatgaagttccgcatgaaaaggaaagacagatgcttcgataaaaaggtcaggtatcatagcaggaagaagcttgcggagcagaggccaagagttaaggggcagtttgtaagccagaagctgaaagcagctatggcaacggaagccgaaactgactcgtga

SEQ ID NO: 207 - protein, 695 aa, Zea mays
MSPDADAAAGGGGGGEASAGAGAGASSPPASASAAANGRALVRWDQILPRRSLRVLLVEHDDSTRQIVTALLRKCGYRVAAVADGMKAWEVMRERAYDFDLVLTEVAMPSLSGIQLLSRIAAAAECKNIPVIMMSSQDSIGTVLKCMQKGAVDFLVKPVRKNELGNLWQHVWRRHAMNCQTNGSENNAASNHVSTNVANGSKTGENNDEESDAQSFGNKRETEIKSAETLPDIRRDEMAGSSKKIELQNKSNDGVNTKVDASKDSDGAPSESEKNVRSKCLNGITSAKVAEQIMDNALRITDASSRRPTNLGKDLAMTEPAADRKCQSLVMENNAVKEKNPGEKSKSAVIGHADSYPSQFLETNLGKQQYRNGYKNQEFREKDIFNHSNSSAFSRYGNRRIESSGEIQFLPSRCIVGQEQHVHGKDPVFQPNGVLLPPNDHNTGESTRQARITLDSSMEGADIICSSSAREDAGASSSSHRKDSMSHPSYGFVPVPIPVGAMMPYHCGAILQPVYYPQGPLMHCNSSAINKATIHQTSGQSNYREDCGSGRPSQVDEHKQSEEKHQLHHSRQIHRESGQPVDMVRAHMDHANQSASCSRDICKGSGCTGSGEADTNANTTVALESGNESGIQNSDRSHREAALMKFRMKRKDRCFDKKVRYHSRKKLAEQRPRVKGQFVSQKLKAAMATEAETDS

SEQ ID NO: 208 - DNA, 1131 bp, Zea mays
atgcaagattggagggtgcgtgagttcgaaggtaaattcactgatgagtttgcccacagcagtagcaacgaacataaaggtggagttgaggcttctggtgtcattagtagtaagaagttgaagcatgcagttgctaatgagaaaatccaaggtgtcatccccggtacaaatagctcaggttcactgaaacgtaattcagagaacatccaacatgcgaacggggtattatcccagaatataagctgcgctggtgactacaaaaatggctccattgcctttcctttgagagaagaaaatacaataactgagaccagatgtccagatgataactggaactcctgtcagtttgcactgaacaatggttcgtccattctcaataaccacagtgctccccaggatagcctcacttatggagataatgatctaaactacatcgaatggcctggcattgacaattttgaggatgtcgatacattattcaggagttctgattcaacatatggtcagcagcagctggagaatgcagatgggttatcttggattccgtcttcagatgctgtttactctaccgatgttgctttgcaacaagggcttgattcgtcttattcagattatggtattctggatgatctctccgcattccaatgtgcagaagataaatcactacccttggttgatccttcatcagctttatgtgataatcaattcaatgatacctacctgttcagtgaacaaaagaatgtgaatgcatatggtgaacagatataccaagaggatttgatggagttgttgcccactgaccagatatgcagcggacatgaaaacattgatatgttgcaggttggaaaccagtatccatctgaaaatgcaattcaagattccagttcaccaagcaatattacttcggagtcctatccaggaaagttcggtccatctagctgttcttctgcacaaagaaactcaaaagtgcagaagaaaactgtcaacatacaaccaagacagccagcaaatgataatgttatgaacacaagcagagcttcttacccttgtgagaactatgaaactgaaagaagaggattagggaaagaactctgggggatcctcaagttacaatgggtagttcaatggtag

SEQ ID NO: 209 - protein, 376 aa, Zea mays
MQDWRVREFEGKFTDEFAHSSSNEHKGGVEASGVISSKKLKHAVANEKIQGVIPGTNSSGSLKRNSENIQHANGVLSQNISCAGDYKNGSIAFPLREENTITETRCPDDNWNSCQFALNNGSSILNNHSAPQDSLTYGDNDLNYIEWPGIDNFEDVDTLFRSSDSTYGQQQLENADGLSWIPSSDAVYSTDVALQQGLDSSYSDYGILDDLSAFQCAEDKSLPLVDPSSALCDNQFNDTYLFSEQKNVNAYGEQIYQEDLMELLPTDQICSGHENIDMLQVGNQYPSENAIQDSSSPSNITSESYPGKFGPSSCSSAQRNSKVQKKTVNIQPRQPANDNVMNTSRASYPCENYETERRGLGKELWGILKLQWVVQW

SEQ ID NO: 210 - DNA, 525 bp, Zea mays
atgtggagggcggtcttcgcagcgctgggcttgctcatggtggccacgctggtgtacaccttggccaccgacggctcgccgttccgccttgagctgtttacgccgtggatggtggcaacactggctgatttttatgttaatgttattgcaatctcggcttgggttatctacaaggaagcaaactgggttagttctgctgtgtgggtggttctgttgttttgctttggcagtgctgtcacttgcgcttatattgttaagaaacttcttgaagtaacatctgcagggtcatcccaagatcctcttgaccttctatttatcaggcaaggtaatctatcccaaagaaagtgctcttatgttgtaattggaagggttattttcagcattttggggatattcatggctgcggttgtcacatatactgtcatcactgatggactaccttttaggaaggaattgttgacaccgtctgggttgctcacaaggaatcatcatggatatcaactaccatttggattgtcttgctga

SEQ ID NO: 211 - protein, 174 aa, Zea mays
MWRAVFAALGLLMVATLVYTLATDGSPFRLELFTPWMVATLADFYVNVIAISAWVIYKEANWVSSAVWVVLLFCFGSAVTCAYIVKKLLEVTSAGSSQDPLDLLFIRQGNLSQRKCSYVVIGRVIFSILGIFMAAVVTYTVITDGLPFRKELLTPSGLLTRNHHGYQLPFGLSC

SEQ ID NO: 212 - DNA, 1095 bp, Zea mays
atggaccgggcggcgctcaccgtgggcccggggatggacatgcccataatgcacgacggcgaccgctacgagcttgtccgcgacatcggctccggcaacttcggcgtcgcgcgcctcatgcgcaaccgcgccgacggccagctcgtcgccgtcaagtacatcgaccgaggcgagaagattgacgagaacgtgcagcgggagatcatcaaccaccgctcgctgcgccaccccaacatcatccgcttcaaggaggtcatcctcaccccgacgcacctggccatcgtcatggagtacgcctccggcggcgagctcttcgagcgcatctgcaacgccggcagattcagcgaggacgaggcgcgtttctttttccaacaactcatatcaggggtcagctactgccattccatgcaagtatgccatcgtgacttgaagctagagaacaccctgttggacggcagcaccgcgcctcgcgtcaagatatgtgatttcggctactcaaagtcatcagttctacactctcagcccaaatctaccgtgggaactccagcatacattgctcctgaggttcttctgaagaaggaatacgatgggaaggttgccgacgtgtggtcgtgtggggtaaccctctacgtgatgctggtcggcgcgtatccattcgaggacccagacgagcctaagaatttcaggaagacgatccagagaatactgggcgtgcagtactcggttccagactacgtccacatatctccggaatgccaggacctaatctccaggatcttcgtcgccaacccgtccaccaggatcaccatgcccgagatacggagccacccttggttcctgaagaacctcccggccgacctggtggacgacagcgcgacgacgacgagcaagcagtacgaggagcccgagcagccgatgcagggcatggacgagatcatgcagatcctgggcgaggccaccattccggcggcggggtcccgcgggctcaaccagttcctgaacgacggcctggacctcgacgacgacatggaggacctggactcggacgccgacctcgacctggagagcagcggggagatcgtgtacgctatgtga

SEQ ID NO: 213 - protein, 364 aa, Zea mays
MDRAALTVGPGMDMPIMHDGDRYELVRDIGSGNFGVARLMRNRADGQLVAVKYIDRGEKIDENVQREIINHRSLRHPNIIRFKEVILTPTHLAIVMEYASGGELFERICNAGRFSEDEARFFFQQLISGVSYCHSMQVCHRDLKLENTLLDGSTAPRVKICDFGYSKSSVLHSQPKSTVGTPAYIAPEVLLKKEYDGKVADVWSCGVTLYVMLVGAYPFEDPDEPKNFRKTIQRILGVQYSVPDYVHISPECQDLISRIFVANPSTRITMPEIRSHPWFLKNLPADLVDDSATTTSKQYEEPEQPMQGMDEIMQILGEATIPAAGSRGLNQFLNDGLDLDDDMEDLDSDADLDLESSGEIVYAM

SEQ ID NO: 214 - DNA, 954 bp, Zea mays
atgattagtgttaatgatgattgcagagatcttcatttccgtaaagctgagtttgatcctgatgattgcccactggattgctcaaagccatgtgagaaagtttgcccagctgatgcaatatcactaaagcatcccatggttgatggagagcacacactatctgatcccttacgtggtaaatatgagggtggtgtaattactgagcggtgctatggatgtggtcggtgcttgccagtttgcccgtatgacagaataagagctgtgtcctatgttcgagaccctactatgactgctgaattattgaaaagcgatgatgttgatgcaatagagatacataccactggaaaaggaactgatatgttcaataccctctgggacaacttgagtgggtccatcaataatgtgaagctggttgcagttagtcttcctgatataggcgaatcaactgttgatctcatgaacgcaatatacacaataatggagtcccattttaaagggtataatctttggcagttagatggccgacctatgagtggtgacattggccgaggtgcaacaagggagacagtttcttttgccgctcatgtggcttcaatgtcagaaagacctcctggattctatcagttggctggtggcaccaactcatacactgttgattgcttaaagaaagctggtcttttccaatcatcaaattggaattcagggaccgcaacctctgaaatggccagttctcaccaagctttaataggagggattgcttatggtggctatgctcgcaagatcgttggacgggttttgcgcaaaataccagaacagtttggccgtgtgcgcatcgaggatcatcctgatcatctactggaggctctacaagaagccatgtcattagtaggacctgtgaagggttatatacccagtcattccaagcctttcatgaaacaagtagatagacaatag

SEQ ID NO: 215 - protein, 317 aa, Zea mays
MISVNDDCRDLHFRKAEFDPDDCPLDCSKPCEKVCPADAISLKHPMVDGEHTLSDPLRGKYEGGVITERCYGCGRCLPVCPYDRIRAVSYVRDPTMTAELLKSDDVDAIEIHTTGKGTDMFNTLWDNLSGSINNVKLVAVSLPDIGESTVDLMNAIYTIMESHFKGYNLWQLDGRPMSGDIGRGATRETVSFAAHVASMSERPPGFYQLAGGTNSYTVDCLKKAGLFQSSNWNSGTATSEMASSHQALIGGIAYGGYARKIVGRVLRKIPEQFGRVRIEDHPDHLLEALQEAMSLVGPVKGYIPSHSKPFMKQVDRQ

SEQ ID NO: 216 - DNA, 783 bp, Zea mays
atgtcgtcgtcgtccgggacgacgatgccgctggcgtaccagacgtcggcgtcgtctcccgagtggctgaacaagggcgacaacgcgtggcagctgacggcggcgacgctggtggggctgcagagcttcccgggtctggtggtcctgtacggcggcgtggtgaagaagaagtgggccgtgaactcggccttcatggcgctgtacgcgttcgcggcggtgtggatctgctgggtgacctgggcctacaacatgtccttcggcgacaggctgctgccgctgtggggcaaggcgcggccggcgctgagccagggcgggctggtggggcaggccggcctccccgccacggcgcaccacttcgccagcggcgccctggagaccccggccgcggagccgctgtacccgatggccacggtggtgtacttccagtgcgtgttcgcggccatcaccctggtgctggtcgccgggtcgctgctgggccggatgagcttcgccgcgtggatgctgttcgtgccgctctggctcaccttctcctacaccgtcggcgccttctccgtatggggcggcgggttcctcttccagtggggcgtcacctccatcatgtgcgtcgccatcaacgccgtcgtcccgctgcgcatgacccaggacaagctcgaggtcggcgacgacgccgtccatggcgaggaggcgtacgcgctctggggagacggcgagctctacgacgtcaccgaccacgggccacgcgccgccgccgccgtcgcgcccatgtccacgcccccgaattga

SEQ ID NO: 217 - protein, 260 aa, Zea mays
MSSSSGTTMPLAYQTSASSPEWLNKGDNAWQLTAATLVGLQSFPGLVVLYGGVVKKKWAVNSAFMALYAFAAVWICWVTWAYNMSFGDRLLPLWGKARPALSQGGLVGQAGLPATAHHFASGALETPAAEPLYPMATVVYFQCVFAAITLVLVAGSLLGRMSFAAWMLFVPLWLTFSYTVGAFSVWGGGFLFQWGVTSIMCVAINAVVPLRMTQDKLEVGDDAVHGEEAYALWGDGELYDVTDHGPRAAAAVAPMSTPPN

SEQ ID NO: 218 - DNA, 417 bp, Zea mays
atggccaccgtcctgagcagcccccgcgcgccggccttctccttctccctccgcgccgcgccagcgcccactaccgtggccatgacccgtggcggtggcgccagcagcaggctgcgcgcgcaggccacctacaacgtgaagctcatcacgccggagggggaggtggagctgcaggtgcccgacgacgtctacatcctggactacgccgaggaggaaggcatcgacctgccctactcctgccgcgcggggtcctgctcctcctgcgccggcaaggtcgtctccggctccgtggaccagtccgaccagagctacctcgacgacggccagatcgccgccggctgggtgctcacctgcgtggcgtaccccacctccgacgtcgtcatcgagacgcacaaggaggatgaccttatctcctaa

SEQ ID NO: 219 - protein, 138 aa, Zea mays
MATVLSSPRAPAFSFSLRAAPAPTTVAMTRGGGASSRLRAQATYNVKLITPEGEVELQVPDDVYILDYAEEEGIDLPYSCRAGSCSSCAGKVVSGSVDQSDQSYLDDGQIAAGWVLTCVAYPTSDVVIETHKEDDLIS

SEQ ID NO: 220 - DNA, 321 bp, Zea mays
atggacgctgccgcggaggcctcaacgccgtcgtccccgtcgaagctgcgcgacaagctgcggaccacggtgtgctgctgcttcggcgtggagagggctcggtggcggcggcggcggggggcggcgacggccgcgggcgagttccgctacgacccgctgagctacgcgctcaacttcgacgagggcgaggacgacgacgcctacgcggaccccgccgcggccttccggtacaggaacttcaacgcgcgcctcccgccctcgccggccgccgctgccgcggtgaggacccagcggccgcagcgggccacggccaccgtctga

SEQ ID NO: 221 - protein, 106 aa, Zea mays
MDAAAEASTPSSPSKLRDKLRTTVCCCFGVERARWRRRRGAATAAGEFRYDPLSYALNFDEGEDDDAYADPAAAFRYRNFNARLPPSPAAAAAVRTQRPQRATATV

SEQ ID NO: 222 - DNA, 1104 bp, Zea mays
atggagctgatcacaaatgtcaccgagtacgagaagctcgcgaaggagaggctgccgaagatggtgtacgactactacgcctccggcgcagaagatcagtggacgctcaaggagaaccgggaggccttctccagaattctgtttaggccacgggtactgatcgacgtctcccgtatcgacatggccacaaacattctgggcttcagcatttccatgcctatcatgatcgctccttcagccatgcagaaaatggctcatcctgatggagagcttgccacggcaagagctgcagcttccgcaggaacaataatgacattgtcctcatggtctacttccagcgttgaagaggtcaactcagttgggccgggcatacgtttcttccagctctatgtctacaaggacaggaacatcgtacggcaactcgtgaaaagggctgagatggctggcttcaaggctattgcactcaccgtagacactccaatacttggccgcagggaagctgacattaagaacaggttcgccttacctccacatctggtgttgaaaaacttccaagcgctggatcttggcacgatggacaagacaaatgattccggccttgcttcctacgttgctggtcaagttgaccgcaccctttcctggaaggacgtcaagtggctgcagacaattacctcgttgccgatcctagtcaaagggatcgtgactgcagaagacactaggcttgcgatcgaatatggcgctgctgggatcatcgtgtccaaccacggcgcgcgccagctagattatgttcctgcgactatcagctgcctggaagaggtcgccagggaagcgaaaggccggctaccggtgttcctcgacggcggcgtccgccgtggcacggacgtcttcaaggccctggcgttgggagcttcaggagtgttcatcggccggcccgtgctgttctcgctggcggtggacggcgaggccggcgtgcggaaggtgctgcagatgctgagggacgagctggagctcaccatggcgctcagcggctgcacgtcgctgagggagataacccgcgcacacgtcatcaccgacagcgaccggatcggccgctcgcggctgtag

SEQ ID NO: 223 - protein, 367 aa, Zea mays
MELITNVTEYEKLAKERLPKMVYDYYASGAEDQWTLKENREAFSRILFRPRVLIDVSRIDMATNILGFSISMPIMIAPSAMQKMAHPDGELATARAAASAGTIMTLSSWSTSSVEEVNSVGPGIRFFQLYVYKDRNIVRQLVKRAEMAGFKAIALTVDTPILGRREADIKNRFALPPHLVLKNFQALDLGTMDKTNDSGLASYVAGQVDRTLSWKDVKWLQTITSLPILVKGIVTAEDTRLAIEYGAAGIIVSNHGARQLDYVPATISCLEEVAREAKGRLPVFLDGGVRRGTDVFKALALGASGVFIGRPVLFSLAVDGEAGVRKVLQMLRDELELTMALSGCTSLREITRAHVITDSDRIGRSRL

SEQ ID NO: 224 - DNA, 1341 bp, Zea mays
atggcggcgcctccggccacggctcccgcgaccgcccgatgtctgtccgtcgccaagtcgtgctgggctgccgagcggagctccagctcgtttgtcctctcggctcctgcgactggcctccggcaaagtgggagccgcgtcctcagcatccgtgccaaggttgccactggcctgcagagggcctgcattgcggatgatggagcggaaaggccgtggaagctcagtgatgctcgtcttgtcctggaagatggatcagtgtggacggccaagtcttttggtgcttcaggaacacaagttggtgaagttgttttcaacacatcactgacaggctatcaggagattttgaccgatccaagttatgctggtcagtttgtcctaatgaccaatcctcatattgggaacactggcgttaatcctgatgatgaagaatcaaaccaatgttttcttggtggcttaatcataagaaatctaagcatatgtacttccaactggcgatgcaaagaaacacttgagaagtatctgattaagaggaacatcatgggaatatatgatgtggatacacgtgctataacacgaagattaagagaagatggtagtcttattggtgtcttgagtactgatcagtctctgacagacaatgagttgttagaaatggcccaaaagtggaaaattgttggagttgatttgattagtggtgtcacatgtgatgctccatatgaatggtcggacaagactgattcagaatgggagtttaagagggatccgtcaagtgaaacttttcatgtggttgcctacgactttggtatcaagcataatattttgagacgattgacatcatatggatgcaaaataacagttgttccagcaaattggcctgcttcagaggtactcaatttgaagcctgatggtgttctttttagcaatggtcctggggatccagctgcagttccctatgctgtgaagacggtacaggaaataattgggaaggttcctgtttttggcatctgtatgggccaccaattgattgggcaggctcttggtgggaagacatttaaaatgaaatttggacatcatggcgggaatcaccctgtctgtgatctccgtagtggacgtgtagacataagtgcacagaaccataactacgcagttgacccagaatcactcccagaaggagcaaaagtaactcacgtcaatctcaacgataatagttgcgctggcctccagtactccaagatgaagcttatgtctctccagtaccatcccgagtcttcccctggtccgcatgactccgacacagccttcggcgagtttatagagctcatgaagagcaacagattgtaa

SEQ ID NO: 225 - protein, 446 aa, Zea mays
MAAPPATAPATARCLSVAKSCWAAERSSSSFVLSAPATGLRQSGSRVLSIRAKVATGLQRACIADDGAERPWKLSDARLVLEDGSVWTAKSFGASGTQVGEVVFNTSLTGYQEILTDPSYAGQFVLMTNPHIGNTGVNPDDEESNQCFLGGLIIRNLSICTSNWRCKETLEKYLIKRNIMGIYDVDTRAITRRLREDGSLIGVLSTDQSLTDNELLEMAQKWKIVGVDLISGVTCDAPYEWSDKTDSEWEFKRDPSSETFHVVAYDFGIKHNILRRLTSYGCKITVVPANWPASEVLNLKPDGVLFSNGPGDPAAVPYAVKTVQEIIGKVPVFGICMGHQLIGQALGGKTFKMKFGHHGGNHPVCDLRSGRVDISAQNHNYAVDPESLPEGAKVTHVNLNDNSCAGLQYSKMKLMSLQYHPESSPGPHDSDTAFGEFIELMKSNRL

SEQ ID NO: 226 - DNA, 777 bp, Zea mays
atggcagattcaatggtagcgagcttctgggggcctgttacatcaacaactgagttgtgcgaggagaattatgcacactcatcatatatagcagaattctacaacacaatttctaatgtcccatgtgttcttttggcgcttattggattagtgaatgctttccgccaaggttttgagaagcgattcagtgtcctgcacatatccaatatgatacttgctattgggagtatgatttttcatgccaccttgcaacttgtcctacaacagagtgacgagactccaatggtctgggagatccttctttatatgtatgtcctttattcgccggactggcattacaggagcacaatgccaaccttccttttcctatatggtgctgcctttgctgtagttcatttctttgcccggttccaattcgtattcaagctgcattacattggcctctgcttcctctgcatcccccggatgtacaagtactacatacagaccaaagacgtggctgcgaagcggctcgcaaagctgtgggttctcacgttaacccttgggactctctgctggctagttgatcgcatcttctgcaagaagctttcgcattggtatgtcaacccgcaggggcacgcatggtggcatgtgcttatgggcctcaactcatactatgcaaacacattcctaatgttctgtcgggctcagcagcgcgggtgggaggcgcgaatcacctaccttcttggatttttgccttatgtcaaggtccagaaaccagagaagaagagggaatga

SEQ ID NO: 227 - protein, 258 aa, Zea mays
MADSMVASFWGPVTSTTELCEENYAHSSYIAEFYNTISNVPCVLLALIGLVNAFRQGFEKRFSVLHISNMILAIGSMIFHATLQLVLQQSDETPMVWEILLYMYVLYSPDWHYRSTMPTFLFLYGAAFAVVHFFARFQFVFKLHYIGLCFLCIPRMYKYYIQTKDVAAKRLAKLWVLTLTLGTLCWLVDRIFCKKLSHWYVNPQGHAWWHVLMGLNSYYANTFLMFCRAQQRGWEARITYLLGFLPYVKVQKPEKKRE

SEQ ID NO: 228 - DNA, 972 bp, Zea mays
atgaggccgtcgctgctgaagtccacggccgagctcctccgccgcagccgcggctacgcgtcctcggccaatccggagcggaaggtggccatcctgggcgcggcgggtggcatcgggcagccgctctcgctcctcatgaagctcaacccgctcgtttcctccctctccctctacgatatcgccggcacccccggcgtcgcggccgacgtctcccacatcaactcccccgccctggtgaaggggttcatgggggacgaccagctcggggaggcgctggagggctccgacatcgtcatcatccccgcaggagtgcccaggaagcccggcatgaccagggacgacctcttcaacatcaacgctcttgtcaatatgatcagcaaccctgtcaactccactgtcccgattgcggcggaggttttcaagaaggctggtacttatgatgagaagaagctgtttggtgtgactactcttgatgttgttcgtgctaaaactttttatgctggaaaagcgggtgtgccagttactgaggtgaatgttcctgttgttggaggccatgcgggtattactattctgccactcttctcacaggccactcctgcaagcaattcgttgtcccaagaagacattgaggctctcaccaagaggacacaagatggtgggacagaggttgttgaagcaaaggctggaaagggctctgcaacattgtccatggcatatgctggtgctgtttttgcagatgcatgcttgaagggtctgaatggagttccggacattgtagagtgctcttttgtgcaatcaactgtgacagagttgccgttctttgcctccaaggttcggctcggcaagaatggagtggaggaagtgcttggtctgggtgagctcaacgacttcgagaagaaggggctggaaagcctcaaggtcgagctcaagtcttccattgacaagggtatcaagttcgcccacgggagctag

SEQ ID NO: 229 - protein, 323 aa, Zea mays
MRPSLLKSTAELLRRSRGYASSANPERKVAILGAAGGIGQPLSLLMKLNPLVSSLSLYDIAGTPGVAADVSHINSPALVKGFMGDDQLGEALEGSDIVIIPAGVPRKPGMTRDDLFNINALVNMISNPVNSTVPIAAEVFKKAGTYDEKKLFGVTTLDVVRAKTFYAGKAGVPVTEVNVPVVGGHAGITILPLFSQATPASNSLSQEDIEALTKRTQDGGTEVVEAKAGKGSATLSMAYAGAVFADACLKGLNGVPDIVECSFVQSTVTELPFFASKVRLGKNGVEEVLGLGELNDFEKKGLESLKVELKSSIDKGIKFAHGS

SEQ ID NO: 230 - DNA, 1827 bp, Zea mays
atggtcggactcctccccgagaccaatgccgcggcggagacggacgtcctcctcgacgcctgggacttcaagggccggccggccccgcgcgccaccaccggccgctggggcgccgccgccatgatcctagtggcggagctgaacgagcggctgacgacgctgggcatcgccgtgaacctggtgacgtacctgacgggcaccatgcacctgggcaacgccgagtccgccaacgtcgtcaccaacttcatgggcacctccttcatgctctgcctcctcggcggcttcgtcgccgactccttcctcggccgctacctcaccatcgccatcttcaccgccgtccaggcctcgggcgtgacgatcctgacgatctcgacggcggcgccggggctacggccggcgtcctgctccgcgaccggcggaggcgtcgtcggggagtgcgcgcgggcgtcgggggcgcagctgggggtgctgtacctggcgctgtacctgacggcgctgggcacgggtgggctaaagtcgagcgtgtcggggttcgggtcggaccagttcgacgagtcggacggcggggagaagcggcagatgatgcgcttcttcaactggttcttcttcttcatctcgctggggtcgctgctggccgtcaccgtgctggtgtacgtccaggacaacctgggcaggcgctggggctacggcgcctgcgcctgcgccatcgccgcgggcctcctcgtcttcctggccggcacacgcaggtaccgcttcaagaagctggccggcagccccctcacgcagatcgccgccgtcgtcgtcgccgcctggcgcaagcgccgcctccctctccccgccgaccccgccatgctctacgacgtcgacgtcggcaaggccgccgccgtcgaggatgggtcctccagcaagaagagcaagcgcaaggagcgcctcccccacaccgaccagttccgcttcctggaccacgcggcgatcaacgaggatccggcggcgggggcgagcagcagcagcaagtggcggctggcgacgctgacggacgtggaggaggtgaagacggtggcgcggatgctgccgatctgggcgaccacgatcatgttctggacggtgtacgcgcagatgaccaccttctcggtgtcgcaggccaccaccatggaccgccgcgtcgggggctcgttccagatccccgcgggctccctcaccgtcttcttcgtcggctccatcctgctcaccgtgcccgtctacgaccgcctggtggtgcccgtcgcgcgccgcgtcagcggcaacccgcacggcctcaccccgctgcagcggatcgccgtcggcctcgcgctctccgtcgtcgccatggcgggcgccgcgctcacggaggtccgccgcctccgcgtcgcgcgcgattcctccgagtccgcctccggaggcgtcgtgcccatgtccgtgttctggctcatcccgcagttcttcctcgtgggggcgggcgaggcgttcacgtacatcggccagctcgacttcttcctgcgcgagtgccccaaggggatgaagaccatgagcacggggctgttcctcagcaccctgtcgctgggattcttcgtcagctccgcgctcgtcgccgccgtgcacagggtcacgggcgaccgccacccctggatcgccaacgacctcaacaagggccgcctcgacaacttctactggctgctcgccgccgtctgcctcgccaacctactagtctacctcgtcgccgcccgctggtacaagtacaaggcgggccgccccggcgccgacggcagcgtcaacggcgtcgagatggccgacgagcccacgctccactga

SEQ ID NO: 231 - protein, 608 aa, Zea mays
MVGLLPETNAAAETDVLLDAWDFKGRPAPRATTGRWGAAAMILVAELNERLTTLGIAVNLVTYLTGTMHLGNAESANVVTNFMGTSFMLCLLGGFVADSFLGRYLTIAIFTAVQASGVTILTISTAAPGLRPASCSATGGGVVGECARASGAQLGVLYLALYLTALGTGGLKSSVSGFGSDQFDESDGGEKRQMMRFFNWFFFFISLGSLLAVTVLVYVQDNLGRRWGYGACACAIAAGLLVFLAGTRRYRFKKLAGSPLTQIAAVVVAAWRKRRLPLPADPAMLYDVDVGKAAAVEDGSSSKKSKRKERLPHTDQFRFLDHAAINEDPAAGASSSSKWRLATLTDVEEVKTVARMLPIWATTIMFWTVYAQMTTFSVSQATTMDRRVGGSFQIPAGSLTVFFVGSILLTVPVYDRLVVPVARRVSGNPHGLTPLQRIAVGLALSVVAMAGAALTEVRRLRVARDSSESASGGVVPMSVFWLIPQFFLVGAGEAFTYIGQLDFFLRECPKGMKTMSTGLFLSTLSLGFFVSSALVAAVHRVTGDRHPWIANDLNKGRLDNFYWLLAAVCLANLLVYLVAARWYKYKAGRPGADGSVNGVEMADEPTLH

SEQ ID NO: 232 - DNA, 1518 bp, Zea mays
atggctccttcctccctccgcccgccgcgccaccacccgtctcccctcgtcgtcctcgccatcgccgtcctcctcgtcttgcgcaccgccgatgggctgccggaggcgggaggaggaggaggaggcggcggtctgtaccgggagattctcagggacgagaccgtgcagaggctcaaggagctgggcaagatatctgatggggatggctaccttgaaaggacgtttctgagtccggcctctatcagagccactggtgtcatcgtcagctggatgaaagacgctgggcttacgacgtgggtcgatcagatggggaatattcatggtcgatatgagccggcaaattctaccagagatgccttgttgattggatctcatatggacactgtcgttgatgctgggatgtacgatggagccttgggtattatttcagcaatctcagcactgaaggttttgaaagttacggggaaactccagaggttaacgagaccagtggaggtcattgcattcagcgatgaggagggcatcagattccagacaacttttctgggaagcgctgctgtagctggtacactacctgaatcaattttacaagtatcagataagagtggcactacactacaagatgttctgaaaatgaattcttttgaggctacctctactgctattagtcaagccaggtacaacccggagtctgtggggagttatgttgaggtacacatggagcaaggccctgtcctggaagcccttcattatccacttggtgttgtaaaaggaattgcaggacagacacgattgaaggtaatagtagatggttcgcaagggcatgctggcacagttccaatgaaattgcgccgtgatccgatggttgcagctgcagagctcgttgtgactctggaacgcctctgtaaagagcccaacagtttgctgacctacgacgaggagtgcagctgcttcactgaggagtccctggccggcctggtgtgcaccgtcggcgagctgaacacgtggccaagcgcgagcaacgtgattccgggccaggtaaacttcacggtggacatccgcgcgatggacgaccaagtgagggagacgatcgtgacgagcttctcgaggcttgttctccagaaatgcgatgacagactggtcgattgcaaggtcgagcataagcactcggcggcagcgacgcactgcgacccggagttaacgtctcagctgaagcgcgcggcgcggtcgaccgtgtcggcaatgccggggcgcaccgtggcggccggcgagacgcccgtgctgatgagcggcgcagggcacgacgcgatggcgatggccaggctcaccaagatcgggatgctgttcgtgcggtgccgcggcggcatcagccactcgccggaggagtcggtgatggacaacgacgtgtgggccgcggggctcgcgctgttcaacttcatcgaccagaacgcggtgtcagaagaactggatgccgggcagaacgtggtggctgtggcgctggcggtggcagagtcgtga

SEQ ID NO: 233 - protein, 505 aa, Zea mays
MAPSSLRPPRHHPSPLVVLAIAVLLVLRTADGLPEAGGGGGGGGLYREILRDETVQRLKELGKISDGDGYLERTFLSPASIRATGVIVSWMKDAGLTTWVDQMGNIHGRYEPANSTRDALLIGSHMDTVVDAGMYDGALGIISAISALKVLKVTGKLQRLTRPVEVIAFSDEEGIRFQTTFLGSAAVAGTLPESILQVSDKSGTTLQDVLKMNSFEATSTAISQARYNPESVGSYVEVHMEQGPVLEALHYPLGVVKGIAGQTRLKVIVDGSQGHAGTVPMKLRRDPMVAAAELVVTLERLCKEPNSLLTYDEECSCFTEESLAGLVCTVGELNTWPSASNVIPGQVNFTVDIRAMDDQVRETIVTSFSRLVLQKCDDRLVDCKVEHKHSAAATHCDPELTSQLKRAARSTVSAMPGRTVAAGETPVLMSGAGHDAMAMARLTKIGMLFVRCRGGISHSPEESVMDNDVWAAGLALFNFIDQNAVSEELDAGQNVVAVALAVAES

SEQ ID NO: 234 - DNA, 915 bp, Zea mays
atggctagcggcgtcctccatcgctccgcctccctatgtctccgcccggccgccggctcctccgccgactccggccggggccacggcgcggttatgatcggtgattcgaggacgcgcgttgctgctctgcggctgggaggatctagccggagagagttattatctgtcacaatggcctccagagatcacactggcttgacccgacaacttcttgattttcaacatgatacaatagatgaggtaggtgcaggacatgatccattcatggatttgaaagcgagattcatggacttcaaacagagaaactatgtggaaaaattttcaaattaccaaacccttgctgagcagcaaacaccaaagttcatggtggttgcttgtgctgactccagggtctgccctaccgctgttttggggtttcagcctggggaagcatttacagttcgtaatgtggcaaatttggtaccaccatatgagcatggggggacagagactagtgcagcactagagtttgctatcaataccctccaggtagagaatgtactggtgataggccacagtaggtgtgggggcatccaggcactaatgagcatgaaagatgattcgacctccggaagcttcattaaaaactgggtttcaattgggaagagcgcaaggttaagcacgaaagctgcagctggaaatatgagttttgacatacagtgcaaacattgtgaaaaggaatcaataaatagttctctgttgaacttgttaacatacccatggattgagaagagggtgaatgaaggcactttgaatctccatggaggctactacaacttcgttgattgcacatttgagaaatggacattattgtaccgtgaagggttggaaggtggaagcaagtacgctataaagaataggtccacctggtcttga

SEQ ID NO: 235 - protein, 304 aa, Zea mays
MASGVLHRSASLCLRPAAGSSADSGRGHGAVMIGDSRTRVAALRLGGSSRRELLSVTMASRDHTGLTRQLLDFQHDTIDEVGAGHDPFMDLKARFMDFKQRNYVEKFSNYQTLAEQQTPKFMVVACADSRVCPTAVLGFQPGEAFTVRNVANLVPPYEHGGTETSAALEFAINTLQVENVLVIGHSRCGGIQALMSMKDDSTSGSFIKNWVSIGKSARLSTKAAAGNMSFDIQCKHCEKESINSSLLNLLTYPWIEKRVNEGTLNLHGGYYNFVDCTFEKWTLLYREGLEGGSKYAIKNRSTWS

SEQ ID NO: 236 - DNA, 1548 bp, Zea mays
atggagctcgccggagcagcctcccctcacccgccgccggaatcccacgtggcgccgccccgcccacctccgcagccgccggaagaggatttatgtgaagatagaggggacatgagtgtcaccggcgaaaagccatgcacacatcgggaatcagatgttggtcagacaaatagttgtagccttaacaattccagtgagtgtgagaatcatacacccagcaacgacgaaatatcggaaccagagtccaatttggagatggccaagactgatcagggcggcgatgtgccgagcggagagaaggtcctgaagaagccagacaagatcctgccgtgccctcgctgcaacagcatggacacgaagttctgctactacaacaactacaacatcaagcagccaaggcatttctgcaagagctgtcagaggtactggaccgcaggcggaagcatgagaaacatccccgttggtgctgggaggcgcaagagcaagagctccagcgcgagttgccgcagcgtgttgattcccgttccaggcagcagtagtgtagctaatcctggcggagaggcttccctgtttccgttgtccgtaaaagcaaaccaagcagcagttagcttcgggcctgattcccccctctgcacctccatggcctccgtgctgaagatcggaggaggaggagagcaggttaagagctgcagccctgcctcagcagcagcacagcccaggaacggagaaacccagacccagacgtgcgcaccttcttctgctgctacaacaccatcagatggtccagggaatggattgcagaaaggagcagagagcgcacaccaaaaccaaaaccaaaaccaaaacggaatcattgggcacagcaacggagtcactccagtgcatcctataccgttcttccccggaccgcctttcgtgtacccctggagtccagcatggaacggcattcccgccatggcagcggcggtgtgcgcagccccagcgacagccgaagcagcgatttcatcagaacacggcaccgcgagcagcaccgtccagtggaacgtgccaccagcgatcgtgcccgtgctgccaccgggattctgcggcccgatcccagtcccggtaatcccgccgccttccgtctggccactgatcactccctggcccaacgcagcatggagcgcgccgtggctcgggcctagcgctagcgtgccgccggggtcatctcggagcagcggcagcagcacgtgctccgacagcggctgcggctccggctcccccgtcctgggaaagcactcgagggagtcgaggccgcagggcgacgagaaggcggaacgacggtgcctgtggatccccaagacgctccggatcgacgaccctgtcgaggccgccaagagctcgatctggacgacgctcgggatcgagcctggcgaccggggcatgttcaggccgttccagtcgaagcatggacggcagcaggagctgcaagcgtccggcgccgctcgcgccctgcaggccaacccggcggctctgtcgcgctcgcagtcttttcaggagacgacgtga

SEQ ID NO: 237 - protein, 515 aa, Zea mays
MELAGAASPHPPPESHVAPPRPPPQPPEEDLCEDRGDMSVTGEKPCTHRESDVGQTNSCSLNNSSECENHTPSNDEISEPESNLEMAKTDQGGDVPSGEKVLKKPDKILPCPRCNSMDTKFCYYNNYNIKQPRHFCKSCQRYWTAGGSMRNIPVGAGRRKSKSSSASCRSVLIPVPGSSSVANPGGEASLFPLSVKANQAAVSFGPDSPLCTSMASVLKIGGGGEQVKSCSPASAAAQPRNGETQTQTCAPSSAATTPSDGPGNGLQKGAESAHQNQNQNQNGIIGHSNGVTPVHPIPFFPGPPFVYPWSPAWNGIPAMAAAVCAAPATAEAAISSEHGTASSTVQWNVPPAIVPVLPPGFCGPIPVPVIPPPSVWPLITPWPNAAWSAPWLGPSASVPPGSSRSSGSSTCSDSGCGSGSPVLGKHSRESRPQGDEKAERRCLWIPKTLRIDDPVEAAKSSIWTTLGIEPGDRGMFRPFQSKHGRQQELQASGAARALQANPAALSRSQSFQETT

SEQ ID NO: 238 - DNA, 2733 bp, Zea mays
atggccgctgtggagccccggcagttcgggcgtctggagccgggctcctcgccagtgcgcgtggccacgaacggcgccaaggcgtaccctcctccggcaagccacctcccgcggcgcgctgactcccctgtccgcggctgcagcttccctcccctcgtctccccgccgcgcaggctggacgacgcgtcggacgacgaggacgaggagcaggaggactggcgagagctgtacggctcgcacctgcagctggaggtggagcccgcggtgcaggacgcgcgcgacgaaggcaccgcggacgcgtggatcgagcggaacccgtgcctggtgaggctgacggggaagcacccgctcaactgcgagccgccgctagcgcggctgatgcaccacggcttcatcaccccggcgccgctgcactacgtgcgcaaccacggcgccgtgccgcggggggactgggcgacgtggaccgtggaggtgacgggcctcgtgaggcggcccgcgcggctcaccatggaggagctggcgcgcgacttccccgccgtggagatccccgtgacgctggcgtgcgcgggcaaccggcgcaaggagcagaacatggtgcagcagacggtgggcttcaactggggcgccgccggcgtgtccacgtccgtgtggcgcggcgcgcgcctccgcgacgtgctccgccgctgcggcatcgtgccccgcaagggcggcgccctcaacgtgtgcttcgagggcgccgaggacctccccggcggcggggggtccaagtacggcaccagcgtcacgcgcgagtgggccctggacccgtcgcgggacatcatgctcgcctacatgcagaacggcgagccgctgctgccggaccacggcttccccgtgcgcgtcatcatccccggctgcatcggtggccgcatggtcaagtggctcaagcgcatcatcgtcacccccgccgagtccgacaattactaccatttcaaggacaaccgcgtcctgccgtcgcacgtcgacgccgagctcgccaacgcagaagcgtggtggtacaagccggagtacatcatcaacgagctgaacataaactcggtgataacgacgccggggcacgacgagatcctgcccatcaacagcattaccacacagcgcggctacaccatgaaaggatacgcctactccggcggcggcaagaaggtgacgcgggtggaggtgacgctggacggcggcgagacatggctggtgtgccacctcgaccacccggagaagcccaacaagtacggcaagtactggtgctggtgcttctggtccgtcgaggtggaggtcctcgacctgctcggcgccaaggagatcgccgtgcgcgcatgggaccagtcgctcaacacccagcccgagaagctcatatggaacctcatggggatgatgaacaactgctggttcaaggtgaaggtgaacgtgtgccgtccgcacaagggcgagatcgggctggtgttcgagcacccgacgcagcccggcaaccagcccggcgggtggatggcgcggcagaagcacctggagacggcggaggcggccgcgccgggcctcaagcgcagcacgtccacgccgttcatgaacaccaccgacgtcggcaagcagttcaccatgtccgaggtgcgcaagcacgcgtcgcaggagtcggcgtggatcgccgtgcacggccacgtctacgactgcaccaagttcctcaaggaccacccgggcggcgccgacagcatcctcatcaacgccggcaccgactgcaccgaggagttcgacgccatccactccgacaaggccaaggcgctcctcgacacctaccgcatcggcgagctcatcaccacgggcaccggctacagctccgacaactccgtccacggcggctccgtcctgtcgcacctcgcgcccatccgcgaggccgtcagggcccccgcgctctccaacccgcgcgataagatccactgccgcctcgtcggcaagaaggagctgtcccgcgacgtccgcctcttccgcttctcgctgccgtcgcccgaccaggtgctcggcctccccatcggcaagcacatcttcgtctgcgccagcattgaagggaagctgtgcatgcgggcgtacacgcccacgagcatggtggacgagatcggccacttcgacctcctcgtcaaggtctacttcaagaacgagcaccccaagttccccaacggcggcctcatgacccagtacctcgactcgcttcccgtcggctcctacatcgacgtcaagggcccgcttggccacgtggagtacaccggccgcggcagcttcgtcatcaacggcaagcagcgccatgcgagccgcctcgccatgatctgcggcggaagtgggatcacgcccatgtaccagatcatccaggcggtgctgcgcgaccagccggaggaccacacggagatgcacctcgtgtacgccaaccggacggaggacgacatcctcctccgcgacgagctcgaccggtgggcggccgagtacccggacaggctcaaggtgtggtacgtcatcgaccaggtaaagcgcccggaggaggggtggaagtacagcgttgggttcgtcacggaggccgtcctgcgggagcacgttccggaaggtggggacgacacgctggcccttgcctgcggaccaccgccgatgatccagttcgccatctcgcccaacttggagaagatgaagtacgacatggccaattctttcgtcgtgttctaa

SEQ ID NO: 239 - protein, 910 aa, Zea mays
MAAVEPRQFGRLEPGSSPVRVATNGAKAYPPPASHLPRRADSPVRGCSFPPLVSPPRRLDDASDDEDEEQEDWRELYGSHLQLEVEPAVQDARDEGTADAWIERNPCLVRLTGKHPLNCEPPLARLMHHGFITPAPLHYVRNHGAVPRGDWATWTVEVTGLVRRPARLTMEELARDFPAVEIPVTLACAGNRRKEQNMVQQTVGFNWGAAGVSTSVWRGARLRDVLRRCGIVPRKGGALNVCFEGAEDLPGGGGSKYGTSVTREWALDPSRDIMLAYMQNGEPLLPDHGFPVRVIIPGCIGGRMVKWLKRIIVTPAESDNYYHFKDNRVLPSHVDAELANAEAWWYKPEYIINELNINSVITTPGHDEILPINSITTQRGYTMKGYAYSGGGKKVTRVEVTLDGGETWLVCHLDHPEKPNKYGKYWCWCFWSVEVEVLDLLGAKEIAVRAWDQSLNTQPEKLIWNLMGMMNNCWFKVKVNVCRPHKGEIGLVFEHPTQPGNQPGGWMARQKHLETAEAAAPGLKRSTSTPFMNTTDVGKQFTMSEVRKHASQESAWIAVHGHVYDCTKFLKDHPGGADSILINAGTDCTEEFDAIHSDKAKALLDTYRIGELITTGTGYSSDNSVHGGSVLSHLAPIREAVRAPALSNPRDKIHCRLVGKKELSRDVRLFRFSLPSPDQVLGLPIGKHIFVCASIEGKLCMRAYTPTSMVDEIGHFDLLVKVYFKNEHPKFPNGGLMTQYLDSLPVGSYIDVKGPLGHVEYTGRGSFVINGKQRHASRLAMICGGSGITPMYQIIQAVLRDQPEDHTEMHLVYANRTEDDILLRDELDRWAAEYPDRLKVWYVIDQVKRPEEGWKYSVGFVTEAVLREHVPEGGDDTLALACGPPPMIQFAISPNLEKMKYDMANSFVVF

SEQ ID NO: 240 - DNA, 1299 bp, Zea mays
atgggggagggcagagcaggagacggcctcatcaagctgttcgggaagaccatccccgtgccggagacggccgccgtcggcgaggctgccaaggacatccaacaaagcggcggcagcggcagcggcacgactgatccgaaagggcaagagaacaacgttcaggactccacaggctcgcctccgcagcaggaggtcgcggacaccgaagactcgtcggcagacaaacagcagggcgaggcgggcaacccaaaggagaagctcaagaagcccgacaagatcctgccgtgcccgcggtgcaacagcatggacaccaagttctgctactacaacaactacaacatcaaccagccgcgccacttctgcaagaactgccagaggtactggactgccggcggtgccatgcgcaacgtgcccgtgggcgcaggccggcgcaagagcaagagcgcgtcggccacttcccacttcctccagagggtcagggccggtctgcccgtcgacccgctcgtctgcgcggcagccaagactaacggcacggtgctcagcttcggctctgccatgtccagcttagacctcacggagcagatgaaacagctcaaggagaagctcgtcccgatagcgggggacgagcgctcagttggctctcgcaatcaaggaccttctgccaaggcagaagacccggaccggaaggaaaatgttacagcagataaatccgcgagagttgttcagcatccatgcatgacgaacggggtggccatgtggccatttagctgcgcgccaccagtaccggcctctgcctgttacggcccaggcagcatcgcaatcccgttctacccggcagctgctgctgctgctgcctactggggttgcatggttccaggagcttggagtggcgcatggccgcctcactccggccagtccgagacgggctcatccattacctccgcctctccagcagcatccaccaagtccaacatctgcttcacgccaggaaagcaccctagagaccgcgacgaggaaggaggcgccaaaggaaatggcaaggtgtgggtgcccaagacgatccggatcgacgacgtggacgaggtggccaggagctctatcctgtcgctaatcgggatcggcggcgacaaggcaggcaaagatggcggcagaggctgcaagctcgcaagggtttttgagcagaacgaagaggcggcaaggacggcaactcctcactcggcagccatcagcggcttgccgttcttgcaggggaacccagctgcgctctcgcggtcactgaccttccaggaggggtcttga

SEQ ID NO: 241 - protein, 432 aa, Zea mays
MGEGRAGDGLIKLFGKTIPVPETAAVGEAAKDIQQSGGSGSGTTDPKGQENNVQDSTGSPPQQEVADTEDSSADKQQGEAGNPKEKLKKPDKILPCPRCNSMDTKFCYYNNYNINQPRHFCKNCQRYWTAGGAMRNVPVGAGRRKSKSASATSHFLQRVRAGLPVDPLVCAAAKTNGTVLSFGSAMSSLDLTEQMKQLKEKLVPIAGDERSVGSRNQGPSAKAEDPDRKENVTADKSARVVQHPCMTNGVAMWPFSCAPPVPASACYGPGSIAIPFYPAAAAAAAYWGCMVPGAWSGAWPPHSGQSETGSSITSASPAASTKSNICFTPGKHPRDRDEEGGAKGNGKVWVPKTIRIDDVDEVARSSILSLIGIGGDKAGKDGGRGCKLARVFEQNEEAARTATPHSAAISGLPFLQGNPAALSRSLTFQEGS

SEQ ID NO: 242 - DNA, 1110 bp, Zea mays
atggctctgctctccgacctcatcaacctcgacctctcgggccgcaccgggaagatcatcgccgagtacatctgggttggcggttccgggatggacgtcaggagcaaagccaggacgctgtccggacctgttgatgaccccagcaagcttccgaagtggaacttcgacggctccagcaccggccaagctccgggcgacgacagcgaagtcatcctttgccctcgggccatcttcagggacccgttcaggaaggggcagaacatactggtcatgtgcgactgctacgagccgaacggggagccgatcccgagcaacaagcggcacggggccgcgaagatctttagccaccctgacgtcaaggctgaggaaccatggttcgggattgagcaggagtacacccttctccagaaggacaccaagtggcctctcggttggccgctgggcggctaccctggccctcagggaccttactactgcgccgtcggagcggacaagtcctacgggcgggacatcgtggacgcgcactacaaggcctgcctctacgccggcatcgacatcagtggcatcaacggggaggtcatgccggggcagtgggagttccaggtcggtcctgccgtcggcgtctcggccggcgaccagctctgggtggctcgctacattcttgagaggatcaccgagatcgccggcgtggttgtctccttcgaccccaagccaattccgggggactggaatggcgctggtgcacacaccaactacagcaccaagtcgatgaggagcgacggcgggtacgaggtgatcaagaaggcgatcggcaagctgggcctccggcaccgggagcacatcgccgcgtacggggacggcaacgagcgccgcctcaccggccgccacgagaccgccgacatcaacaccttcgtctggggcgtcgcgaaccgcggggcgtcggtgcgggtgggccgcgacaccgagaaggaaggcaaaggctacttcgaggaccggaggccggcgtccaacatggacccgtacgtggtgacctcgctgatcgcggagacaaccatgctgtgggagcccagccactccaacggcgacggcaagggcgccgcggctccttga

SEQ ID NO: 243 - protein, 369 aa, Zea mays
MALLSDLINLDLSGRTGKIIAEYIWVGGSGMDVRSKARTLSGPVDDPSKLPKWNFDGSSTGQAPGDDSEVILCPRAIFRDPFRKGQNILVMCDCYEPNGEPIPSNKRHGAAKIFSHPDVKAEEPWFGIEQEYTLLQKDTKWPLGWPLGGYPGPQGPYYCAVGADKSYGRDIVDAHYKACLYAGIDISGINGEVMPGQWEFQVGPAVGVSAGDQLWVARYILERITEIAGVVVSFDPKPIPGDWNGAGAHTNYSTKSMRSDGGYEVIKKAIGKLGLRHREHIAAYGDGNERRLTGRHETADINTFVWGVANRGASVRVGRDTEKEGKGYFEDRRPASNMDPYVVTSLIAETTMLWEPSHSNGDGKGAAAP

SEQ ID NO: 244 - DNA, 762 bp, Zea mays
atggcggcagctgctagtgccctgctcctcctgctctgctcagccttctgctcccttgcccaccgggcggccggcgtcgactacggctcgtggcagagcgcccacgccacgttctacggcggcggcgacgcgtctggcacgatgggcggcgcgtgcggctacgggaacatgtacagcacggggtacggcaccaacacggcggcgctgagcacggcgctgttcaacgacggcgccgcgtgcgggtcctgctacgagctgcgctgcgacaacaacgggcagtcgtgcctgccgggcaccatcaccgtcacggccaccaacttctgcccgcccaactacggcctccccagcgacgacggcggctggtgcaacccgccgcgcccgcacttcgacatggcccagccggccttcctccagatcgcgcagtaccgcgccggcatcgtgcccgtcgcctacaggagggtgccgtgcgtgaagaagggcgggatcaggttcaccatcaacggccactcctacttcaacctggtgctggtgaccaacgtggccggcgccggggacgtgcagtccgtgtccatcaagggctccagcaccgggtggcagcccatgtcccgcaactggggccagaactggcagagcaactcgctcctcgacggccagagcctgtccttccaggtcaccgccagcgacggccgcaccgtcaccagcaacggcgtcgctccggcgggctggcagttcggccagaccttcgagggcgcccagttctag

SEQ ID NO: 245 - protein, 253 aa, Zea mays
MAAAASALLLLLCSAFCSLAHRAAGVDYGSWQSAHATFYGGGDASGTMGGACGYGNMYSTGYGTNTAALSTALFNDGAACGSCYELRCDNNGQSCLPGTITVTATNFCPPNYGLPSDDGGWCNPPRPHFDMAQPAFLQIAQYRAGIVPVAYRRVPCVKKGGIRFTINGHSYFNLVLVTNVAGAGDVQSVSIKGSSTGWQPMSRNWGQNWQSNSLLDGQSLSFQVTASDGRTVTSNGVAPAGWQFGQTFEGAQF

SEQ ID NO: 246 - DNA, 705 bp, Zea mays
atggccgtcaactgggagctgcagggctgctgccaccgcgaccagaggatcttcatcgccgccgttggagtctccaccgtcgtcatcctcctcctctggaggacgttcctgctcacgccgttcaagctcatcaccgtcttcctccacgagaccagccacgcgctcgcctgcaagctcacctgcggcgatgtagaaggcatgcaggtccatgcgaatgagggtggcgttactcaaacccggggtggcatatattggataatcttgcccgctggatatctgggttcatcattttggggaatggtcttcatacttgcatccacaaatctcctcactacaagaattgcagcgggttgtttcatacttgcactgtttattgtcctttttgttgcagacaattggtttcttcgctggctctgccttggattcattgtattcattgctgttgtttgggtcatacaagaatttacatctttccatattctgaaatatgtgatcttattcataggtgtgatgaacagcttattttcagtttatgatatttatgacgacttgatatcccgaagagttaatacaagtgatgctgagaagtttgctgaaatatgcccttgcccttgcaatggttttgcatggggtgttatatggggattcatctcgtttatcttcctctgcgcttcaatataccttggactggtcatattgtcttga

SEQ ID NO: 247 - protein, 234 aa, Zea mays
MAVNWELQGCCHRDQRIFIAAVGVSTVVILLLWRTFLLTPFKLITVFLHETSHALACKLTCGDVEGMQVHANEGGVTQTRGGIYWIILPAGYLGSSFWGMVFILASTNLLTTRIAAGCFILALFIVLFVADNWFLRWLCLGFIVFIAVVWVIQEFTSFHILKYVILFIGVMNSLFSVYDIYDDLISRRVNTSDAEKFAEICPCPCNGFAWGVIWGFISFIFLCASIYLGLVILS

SEQ ID NO: 248 - DNA, 1050 bp, Zea mays
atggcactggaggcgggtagcagcggcggcggcgggaggggatggggtggcaggttccgaagcctgatgcggcggaagcaggtggactccgatcgggtccgcgccgagggccagccgcagctcgccaaggagctcaacgtgccggagctggtcgcgatcggggttggttccacagttggagcaggagtatatgttcttgtgggaataattgctagggagcacgctggtccagcattgacaatttcatttctgatagctggaatagcagccgcgctttcagctttctgttatgctgagcttgctagtcgttgcccctctgctggaagtgcctaccattattcatacatctgtgttggagaaggtgttgcctggttgattggctgggctctagtgctggaatatactattggtggatctgctgttgcccgtggtatatctccaaacttagccttgttttttggaggacaggatagtctgccatggattttagcacgccatcagcttccatggtttggtatcattattgatccctgtgcagctgctcttgtttgtgttgtgactgttttactctgcatgggaattaaagagagttcatttgcacaaggagttgtaacagttctgaatgcttttgtaatgatatttgttattgtagctggtagttatattggcttccaaataggatgggtcggctacaaggtttctgatgggtatttcccatatggagtaaatggaatgcttgctggatcagcaactgttttctttgcatacataggctttgatacagtcgctagtacagctgaagaggtaaagaatccacagagagatctgccattgggaatcggagtagcattggctatttgttgtgcattgtatatggctgtttctgttgttattgttgggctggtaccatattttgccatggacccagatactcctatttcatctgcctttgcaaaacatggcaatgcaatgggccatgtacgttgtgacaactggtgctgttcttgcactctgctcgaacttgatgggctcacttcttccacagcctag

SEQ ID NO: 249 - protein, 349 aa, Zea mays
MALEAGSSGGGGRGWGGRFRSLMRRKQVDSDRVRAEGQPQLAKELNVPELVAIGVGSTVGAGVYVLVGIIAREHAGPALTISFLIAGIAAALSAFCYAELASRCPSAGSAYHYSYICVGEGVAWLIGWALVLEYTIGGSAVARGISPNLALFFGGQDSLPWILARHQLPWFGIIIDPCAAALVCVVTVLLCMGIKESSFAQGVVTVLNAFVMIFVIVAGSYIGFQIGWVGYKVSDGYFPYGVNGMLAGSATVFFAYIGFDTVASTAEEVKNPQRDLPLGIGVALAICCALYMAVSVVIVGLVPYFAMDPDTPISSAFAKHGNAMGHVRCDNWCCSCTLLELDGLTSSTA

SEQ ID NO: 250 - DNA, 1743 bp, Zea mays
atgggagaagttgaggacatgtacacccaagacgggaccgtggacatgaaagggaatcccgccgtgaagaagggcaccggcaactggcgcgcctgcccctacatcctcgcgaacgagtgctgcgagaggctggcttactatggcatgagcaccaacctggtgaactacatgaagacccgacttggccaggtgaactccgttgcctccaacaacgtcaccaactggcaagggacgtgctacatcacgccgctcatcggcgccttcttcgccgacgcgtacatggggaggttctggaccatcgccatcttcatgatcatctacattttcggcctggcgctgctgacgatggcttcgtcggtgaaggggctggtgcctacgtcgtgcggcgacaaggatgtgtgccacccgacggacgcgcaggcggcggtggtgttcgtggcgctgtacctcatcgcgctgggcacgggcgggatcaagccgtgcgtgtcctccttcggcgccgaccagttcgacgagaacgacgagcgggagaagaagagcaagagctccttcttcaactggttctacttctccatcaacatcggcgcgctggtggcgtccacagtgctggtgtacgtgcagacgcacgtgggctggggctggggcttcggcatccccgccgtggtcatggccatcgccgtcggcagcttcttcgtgggcacgccgctgtacaggcaccagaagcccgggggcagcccgctgacgcgcatcgcgcaggtgctcgtcgcgtgcgcgcgcaagtggaacgtggccgtgcccgcggacaagtcgcggctgcacgagacggtggacggggagtccgtcatcgaggggagccgcaagctggagcactcggagcagctggcgtgcctcgacagggctgccgtggtgacggccgaggacggcgcggaggcgagcccgtggcgcctgtgctcggtgacgcaggtggaggagctcaagagcgtgatccggctgctgcccatctgggccagcgggatcgtgttcgcggcggtgtactcgcagatgagcaccatgttcgtgctgcagggtaacacgctggaccagagcatggggccccggttcaagatcccctcggcgacgctgtccatggtggacaccatcagcgtcatcgtctgggtccccgtgtacgaccgcgccatcgtgcccctggtgcgctcctacaccgggaggccgcgcgggttcacgcagctgcagcgcatgggcatcggcctcgtcgtctccatcttctccatggtggcggcgggcgtgctggacatcgtgcggctgcgcgccatcgcgcggcacggcctgtacggcgaggacgacatcgtgcccatctccatcttctggcagataccgcagtacttcatcatcgggtgcgcggaggtgttcaccttcgtggggcagctggagttcttctacgaccaggcgcccgacgccatgaggagcatgtgctccgcgctgtcgctcaccaccgtcgcgctcggcaactacctcagcacggtcctggtgaccatcgtcacccacatcaccaccaggcacggccgcatcgggtggatcccggagaacctcaaccgcggccacctcgactacttcttctggctgctcgccgtgctcagccttctcaacttccttgcctacctcgtcatcgccagctggtacaagtacaagaagacggccgatgattaccctggcgccaaaggggagcacggtacagagcactga

SEQ ID NO: 251 - protein, 580 aa, Zea mays
MGEVEDMYTQDGTVDMKGNPAVKKGTGNWRACPYILANECCERLAYYGMSTNLVNYMKTRLGQVNSVASNNVTNWQGTCYITPLIGAFFADAYMGRFWTIAIFMIIYIFGLALLTMASSVKGLVPTSCGDKDVCHPTDAQAAVVFVALYLIALGTGGIKPCVSSFGADQFDENDEREKKSKSSFFNWFYFSINIGALVASTVLVYVQTHVGWGWGFGIPAVVMAIAVGSFFVGTPLYRHQKPGGSPLTRIAQVLVACARKWNVAVPADKSRLHETVDGESVIEGSRKLEHSEQLACLDRAAVVTAEDGAEASPWRLCSVTQVEELKSVIRLLPIWASGIVFAAVYSQMSTMFVLQGNTLDQSMGPRFKIPSATLSMVDTISVIVWVPVYDRAIVPLVRSYTGRPRGFTQLQRMGIGLVVSIFSMVAAGVLDIVRLRAIARHGLYGEDDIVPISIFWQIPQYFIIGCAEVFTFVGQLEFFYDQAPDAMRSMCSALSLTTVALGNYLSTVLVTIVTHITTRHGRIGWIPENLNRGHLDYFFWLLAVLSLLNFLAYLVIASWYKYKKTADDYPGAKGEHGTEH

SEQ ID NO: 252 - DNA, 984 bp, Zea mays
atgctgtcttctcaccgcgagagcctgctgccctacgcgccggggcggcgggcggcggtgctgctcgaccaccggcggtaccgcccgaacgtcgaggtggcgcccagctgcccgcgctgcgactcgcccaacaccaagttctgctactacaacaactacagcctcagccagccccgctacttctgcaagggctgccgccgctactggaccaagggcggctccctccgcaacgtgcccgtcggcggcgggtgccggaagaaccgcagcaggggcaagccggtccgagccgtggccgtcgattccgtggcgcccagcagcggtggcgcggcggcgttcacgcaccgggcgtcggcgtcgtcgtcgtcggcgtcccccgccacgctgcggccggacatgctactggaaggcatgctcggcagcccaagcgagctgtgccagctgacggtgacggacgacgacgcagcggaaaacccggctgtggcgcccgatggacccaggatcgacctggcgttgctgtacgccaagttcttgaaccaacagccgccggcgcccgagcggcgcgccgtcctgccggaatcgctcgtcgtcgacaccttgagcgggtcgtcgtcgagcgacgtgggtcccgtcgtcccatcgcgggatcatcagccgttcacgacgcaagacgacgggctgggcgagctgtccgcggcggcgagcgcagagccgagcgctcctccgccacagtcgtcgtcgtgtgcggaggcgcttattggggcgttcggcatggaccagcgctgctacgactctctgggtttgccaccagacggcggggatctagtcctaccgtcgacgtggcctcttcttggggccaagtacgagctgttcgatccgctacctgaggacgccgtgagccttcaggacggcttcgccggcgacgaggacgtgtggagcggcgccttggcttgtcaagggctggaagcagctctctgcaggccgtaa

SEQ ID NO: 253 - protein, 327 aa, Zea mays
MLSSHRESLLPYAPGRRAAVLLDHRRYRPNVEVAPSCPRCDSPNTKFCYYNNYSLSQPRYFCKGCRRYWTKGGSLRNVPVGGGCRKNRSRGKPVRAVAVDSVAPSSGGAAAFTHRASASSSSASPATLRPDMLLEGMLGSPSELCQLTVTDDDAAENPAVAPDGPRIDLALLYAKFLNQQPPAPERRAVLPESLVVDTLSGSSSSDVGPVVPSRDHQPFTTQDDGLGELSAAASAEPSAPPPQSSSCAEALIGAFGMDQRCYDSLGLPPDGGDLVLPSTWPLLGAKYELFDPLPEDAVSLQDGFAGDEDVWSGALACQGLEAALCRP

SEQ ID NO: 254 - DNA, 1107 bp, Zea mays
atggcgttgatcacgaatgtctctgactatgaggagcttgcaaagcagaagctgcctaagatggtttatgacttctatgccgggggtgcagaagaccagtggacactcaaggagaataaggaggcattctccaagattctgtttcgaccacgggtgctgattgatgtgtctcatattgacatgtctacaagtatattgggttacaaaatttccatgcctattatggtggctcccactgctttgcacaaactagcccaccaagaaggagaggttgcttctgcccaggcagcagctgctgcaggaactataatgacgttgtcttcatggtcatcttgcagcattgaggaagttagctcaattgcaccaggactccgtttcttccaactttcagtattcaaggatagggatatcgtgcaacagcttgtcagaagggctgaaaatgctggctataaggcaatcgccgtcactgtcgacgctccacgccttggtcgcagggaagccgatgtcaggaacagattcaggctgcctgaaaatgtggtgttgaagtgctttgaaggactggatctcagcaagatggacaagactaagggttcaggccttgctgcttacgccactagccagattgacagctctctttcttggaaggatatcaagtggctacagacgattaccgggctgcctatcttagtgaaaggagtcataacagcagaagatgctcgaattgctatcgaatgcggtgtcgccggcattatcgtgtccaaccacgggggccgccagctagactatcttcctgcaaccatcagctgcctggaagaggttgtgagagaagcgaagggccgccgtgtgcctgtgttcctcgacggcggcatccgccgtggcactgacgtgttcaaggccttggcgctgggagcctcaggagtgtttattggaaggcccgtactgttcgccctcgccgtggacggcagggcaggggtgaggaatgcgctgcggatgctgagggatgagctcgagatcaccatggcgctgagcggctgcgcgtcgctgaaagatatcacccgcgatcgcgttatcactgagcgcgacatgatccgtcgctctcggatatag

SEQ ID NO: 255 - protein, 368 aa, Zea mays
MALITNVSDYEELAKQKLPKMVYDFYAGGAEDQWTLKENKEAFSKILFRPRVLIDVSHIDMSTSILGYKISMPIMVAPTALHKLAHQEGEVASAQAAAAAGTIMTLSSWSSCSIEEVSSIAPGLRFFQLSVFKDRDIVQQLVRRAENAGYKAIAVTVDAPRLGRREADVRNRFRLPENVVLKCFEGLDLSKMDKTKGSGLAAYATSQIDSSLSWKDIKWLQTITGLPILVKGVITAEDARIAIECGVAGIIVSNHGGRQLDYLPATISCLEEVVREAKGRRVPVFLDGGIRRGTDVFKALALGASGVFIGRPVLFALAVDGRAGVRNALRMLRDELEITMALSGCASLKDITRDRVITERDMIRRSRI

SEQ ID NO: 256 - DNA, 1497 bp, Zea mays
atgtcgacgtgcgcggcggacctggcgccgctgctcggcccggcggcggcgaacgccacggactacctgtgcgggcagttcgcggacacggcctccgcggtggacgccacgtacctgctcttctcggcctacctcgtgttcgccatgcagctcggcttcgccatgctgtgcgccggctccgtccgcgccaagaacaccatgaacatcatgctcaccaacgtgctcgacgccgccgcgggggcgctcttctactacctcttcggcttcgccttcgccttcggcacgccctccaacggcttcatcggcaagcagttcttcgggctcaagcacctgcccaggaccggcttcgactacgacttcttcctctaccagtgggccttcgccatcgccgccgcgggcatcacgtcgggctccatcgccgagcggacccagttcgtcgcctacctcatctactccgcgttcctgacggggttcgtctaccccgtggtgtcgcactggttctggtccgccgacggctgggccggcgccagccgcacgtccggcccgctgctcttcgggtccggcgtcatcgacttcgccggctccggcgtcgtccacatggtcggcggcatcgcggggctgtggggcgcgctcatcgagggcccccgcatcgggcgcttcgaccacgccggccgctccgtggcgctcaagggccacagcgcgtcgctcgtggtgctcggcaccttcctgctgtggttcggctggtacgggttcaaccccgggtccttcaccaccatcctcaagtcgtacggccccgccgggaccgtccacgggcagtggtcggccgtgggccgcaccgccgtcaccaccaccctcgccggcagcgtcgccgcgctcaccacgctgttcgggaagcggctccagacgggccactggaacgtggtggacgtctgcaacggcctcctcggcgggttcgcggccatcacggccgggtgcagcgtggtggagccgtgggcggccgtcatctgcgggttcgtgtccgcgtgggtgctcatcggcgccaacgccctcgcggcgcgcttcaggttcgacgacccgctggaggcggcgcagctgcacggcgggtgtggcgcctggggcgtcctcttcacggggctcttcgcgaggcgaaagtacgtggaggagatctacggcgccgggaggccctacgggctgttcatgggcggcggcgggaagctcctcgccgcgcagatcatccagatcctggtgatcgccgggtgggtgagctgcaccatgggcccgctcttctacgcgctcaagaagctgggcctgctgcgcatctcggccgacgacgagatgtccggcatggacctgacccggcacggcggcttcgcctacgtctaccacgacgaggaccctggcgacaaggccggggttggtgggttcatgctcaagtccgcgcagaaccgtgtcgagccggcggcggcggtggcggcggcgaccagcagccaggtgtaa

SEQ ID NO: 257 - protein, 498 aa, Zea mays
MSTCAADLAPLLGPAAANATDYLCGQFADTASAVDATYLLFSAYLVFAMQLGFAMLCAGSVRAKNTMNIMLTNVLDAAAGALFYYLFGFAFAFGTPSNGFIGKQFFGLKHLPRTGFDYDFFLYQWAFAIAAAGITSGSIAERTQFVAYLIYSAFLTGFVYPVVSHWFWSADGWAGASRTSGPLLFGSGVIDFAGSGVVHMVGGIAGLWGALIEGPRIGRFDHAGRSVALKGHSASLVVLGTFLLWFGWYGFNPGSFTTILKSYGPAGTVHGQWSAVGRTAVTTTLAGSVAALTTLFGKRLQTGHWNVVDVCNGLLGGFAAITAGCSVVEPWAAVICGFVSAWVLIGANALAARFRFDDPLEAAQLHGGCGAWGVLFTGLFARRKYVEEIYGAGRPYGLFMGGGGKLLAAQIIQILVIAGWVSCTMGPLFYALKKLGLLRISADDEMSGMDLTRHGGFAYVYHDEDPGDKAGVGGFMLKSAQNRVEPAAAVAAATSSQV

SEQ ID NO: 258 - DNA, 762 bp, Zea mays
atgcaggagttccaatccatcccggggctggcggggcggctgttcggcggggcagcggccgccggcctccggcgcgcgcaggggcagtgcggcggcgggggtgcctcggccgcggcggccgtgaagtgcccgcggtgcgagtccaccaacaccaagttctgctactacaacaactacaacctgtcgcagccgcgccacttctgcaagggctgccggcggtactggaccaagggcggcgtcctgcgcaacgtgcccgtgggcgggggctgccgcaaggccaagcgctcgtcggcgccgtccacgcccacgcccacgcccacgtcggcggtgggcgacgccaagagcccgcgccgcgcctcggcgtcctcgccccgcggctccatcagcagcggcagcggcagcgcgagccccacgcccaacggcttcgccttctcctccacggccgacgtggtggcgccgccgccggcgccgatattcgccgatcaggcggcggcgctggcgtctctcttcgcgcctccgccgccgctcccggcgttcagcttcgtggcggcgcaggctaaggaggaaacgtcctccacccccgctggcttcgcggcgccgtactcctcagtatccgaggacatggcaccgttcgcgtccctggacgccgctgggatgttcgagatcggcgaggacgcgtcggccgcggcggcgtactggaacgccgggagctgctggacggacgtgccggacccgagcatgatgatgtacctgctaccctag

SEQ ID NO: 259 - protein, 253 aa, Zea mays
MQEFQSIPGLAGRLFGGAAAAGLRRAQGQCGGGGASAAAAVKCPRCESTNTKFCYYNNYNLSQPRHFCKGCRRYWTKGGVLRNVPVGGGCRKAKRSSAPSTPTPTPTSAVGDAKSPRRASASSPRGSISSGSGSASPTPNGFAFSSTADVVAPPPAPIFADQAAALASLFAPPPPLPAFSFVAAQAKEETSSTPAGFAAPYSSVSEDMAPFASLDAAGMFEIGEDASAAAAYWNAGSCWTDVPDPSMMMYLLP

SEQ ID NO: 260 - DNA, 1185 bp, Zea mays
atggcgtcaaccgttaccttcagcctaattagcacccaagctgggttgatccataagccaaggaaccttggagccacaagctacgctggcttaaaggtgccgagctttggctctgaatcatcattcttgggtaggaacgcatcccttcgggcggctgttactacaaggattgtgcccaaggcaaagtctggatctcagatatcgccacatgcatcttacaaggtggcgctgctcggtgctgctggtggcatcggtcaacccttgggcctattgattaagatgtctcccctggtgtccgagctgcatctgtatgatattgctaatgtcaagggagtcgctgcagatctcagccactgcaacacgcccgctcaggtacttgacttcactgggccctcagagttagccagctgcttgaaaggcgtggatgttgttgtcatccctgccggggtcccaaggaagccgggcatgactcgtgatgacctttttaacatcaacgcgagcatcgtcaagtcacttgttgaggctgtcgcggacaattgccccgaggcgttcatccatatcatcagcaacccggtgaattccaccgtgccaatcgcagcagaggttttgaagcagaagggcgtctacaatctcaagaagctttttggggttaccaccctggatgttgtcagggctaacacatttgtggcgcagaagaagaaccttaagctcatcgatgttgatgtcccagttgttggtggccatgctgggatcacaattctgccgttgctatcaaagaccaggccgtccgtcaccttcacagatgaggaagctgaggagctgacaaagaggatacagaatgccgggacagaggtggtggaggcaaaggctggtgctgggtctgctaccctgtccatggcctacgctgctgccagattcgtcgagtcgtctctccgcgccctggccggtgaccccgatgtttacgagtgcacatttatccagtccgaggcaaccgatctgccattcttcgcaacaagagtcaagctcggcaagagtggtgtcgaatccatcgtttctgccgacctcgagggagtgaccgagtgcgaggccaaggcgcttgacgcgcttaaggccgagttgaagggaagcattgagaagggtgtcgccttcgccagcaaacagcaggaggctgctgcatctgtttga

SEQ ID NO: 261 - protein, 394 aa, Zea mays
MASTVTFSLISTQAGLIHKPRNLGATSYAGLKVPSFGSESSFLGRNASLRAAVTTRIVPKAKSGSQISPHASYKVALLGAAGGIGQPLGLLIKMSPLVSELHLYDIANVKGVAADLSHCNTPAQVLDFTGPSELASCLKGVDVVVIPAGVPRKPGMTRDDLFNINASIVKSLVEAVADNCPEAFIHIISNPVNSTVPIAAEVLKQKGVYNLKKLFGVTTLDVVRANTFVAQKKNLKLIDVDVPVVGGHAGITILPLLSKTRPSVTFTDEEAEELTKRIQNAGTEVVEAKAGAGSATLSMAYAAARFVESSLRALAGDPDVYECTFIQSEATDLPFFATRVKLGKSGVESIVSADLEGVTECEAKALDALKAELKGSIEKGVAFASKQQEAAASV

SEQ ID NO: 262 - DNA, 360 bp, Zea mays
atgagggttctctctgttgcggtcgctctggtcgtggtggtggccgcggcctgcctcgccgcgccgcggggcgcggacggcgcgggcgagtgcggtgcgacgccgccggacacggtggcgctgaggctggcgccgtgcgcgtcggcggcggaggaccccggctccgcgccgtccggctcctgctgcagcgcggtgcacgccatcgggaagcagagccccaggtgcctctgcgccgtcatgctgtccaacaccgccaggagcgccgggatcaaggccgaggtcgccatcaccatccccaaacgctgcaacctcgccgaccgccccgttggctacaagtgcggagattacactctgccatga

SEQ ID NO: 263 - protein, 119 aa, Zea mays
MRVLSVAVALVVVVAAACLAAPRGADGAGECGATPPDTVALRLAPCASAAEDPGSAPSGSCCSAVHAIGKQSPRCLCAVMLSNTARSAGIKAEVAITIPKRCNLADRPVGYKCGDYTLP

SEQ ID NO: 264 - DNA, 918 bp, Zea mays
atgcaggagttccagtccatccctggcctggccgggcggctcttcggcggggccgcggcccccggcgacctccggcgcgcgcaggcggcgcagcatggccccggcggagcgcggtgcggcggtgcctcgcccgcggcgccggaggcggtgaagtgcccgcggtgcgagtctaccaacaccaagttctgctactacaacaactacaacctgtcgcagccgcgccacttctgcaagagctgccgccggtactggaccaagggcggcgtcctgcgcaacgtccccgtgggcggcggctgccgcaaggcgaagcgcgcctcgtcctcggcgtcggcgtcggcgtcggtgtcctcgcccgcctcgtcctcggcgccgtccacgcccgcgtcggccgacgcgggcaagaacccgcgccgcgcctcggcgtcctcgccctcgccccgctccaacagcggcagcgcgagccccacggccgccgccgcgacgaccccgaccccgaccgatccgaccacccccgccacgccgtcgtcgaacggcgtcgccttcacgggcagccaccactcgtcgaaccccttctccacgatcgacgtggcggccgcgccaccggcgccgatattcgccgaccaggcggcggcgctggcgtccctcttcgcgcctccccctccgccgccgctcccggtgttcagcttcgcggcggcgcagccgaaggaggaggaagcgcccaccaattcggagctgcagcaacacctcgccgcacaggcggcgccgtcgtcgtcggtctccgaggacatcatggcgccgttcgcatccctggacgccgctgggatattcgagctcggcgacgccgcgtcagccgcggcgtactggagcgccgggagctgctgggcggacgtccaggacccgagcttgtacctaccctag

SEQ ID NO: 265 - protein, 305 aa, Zea mays
MQEFQSIPGLAGRLFGGAAAPGDLRRAQAAQHGPGGARCGGASPAAPEAVKCPRCESTNTKFCYYNNYNLSQPRHFCKSCRRYWTKGGVLRNVPVGGGCRKAKRASSSASASASVSSPASSSAPSTPASADAGKNPRRASASSPSPRSNSGSASPTAAAATTPTPTDPTTPATPSSNGVAFTGSHHSSNPFSTIDVAAAPPAPIFADQAAALASLFAPPPPPPLPVFSFAAAQPKEEEAPTNSELQQHLAAQAAPSSSVSEDIMAPFASLDAAGIFELGDAASAAAYWSAGSCWADVQDPSLYLP

SEQ ID NO: 266 - DNA, 1269 bp, Zea mays
atgccttcccgatcggattccgactccctgctggtgcgcgccgagggcatgcgcgacgcggcgctggactaccacggccgccccgccgaccgcggcgccaccggcggctggaggtcggcgctcttcatcataggcgtggagatcgcggagcggttcacgttctacggcgtgtcggcgaacctgatcaactacctgactggcccgctcgggcagggcaccgcggcggcggcggcggccatcaacgcctggaacggggtggcgcagctgctgccgctgctgggcggggccctcgcggacaagtggctcggccgctaccgcaccatcgtcatcgcctcgctcctctacatcctcggtctgggtatgttggccttttctaccttcctctcctccggcagcggccaccagtgcaccgccgcagggggccagatctgtgcgccgtctggccttaaggtgaccttcttctacgtctccctctatatcgtggccgtggcgcagggcggccacaagccgtgcgtccaggcgttcggcgccgaccagttcgaccagaccgaccccaaagagactgtctccaggagctccttctttaactggtggtacttcggcatgtgcgccggcactgccgtcacgctcgtgctcctcagctacgtgcaggacaacatcggatggggcctcgggttcggcatcccgtgcgccgtcatggcagccgcgctcgccgtattcctttttggcactcggacgtaccggtactacgtcactgccgagcagggcctgttcgctcgtgccggcgaggctttcgctgagtgggcggagcaggcgcaaggcgggccagcttgttcaggattcccaagaactcgatccgcccgcagcagatgcgccaaggttcaggtatgtatactctgtcactgtatgcggagcacaatctgttccaggctgcagtcaaaaataatcgaggcctcgtcaaggaggccaaggccatcatccgtttgttcccgatatgggcggcatgcctgctctacgcggtggcgtactcgcagtcgtcgacgttcttcacgaaacaggcggcgaccctggaccggcggatcgggcggcacgtccaggtgccacctgctgcgctgcagagcttcatcagcgtcacaatcgtggtcatcatccctatctacgaccgcgtcctcgtgccggtgtcgcgccggtactccggcaaaccatcagggatcaccatgctgcagcgcatcggcacggggatgttcctctcgctcttgtccatggtga

SEQ ID NO: 267 - protein, 422 aa, Zea mays
MPSRSDSDSLLVRAEGMRDAALDYHGRPADRGATGGWRSALFIIGVEIAERFTFYGVSANLINYLTGPLGQGTAAAAAAINAWNGVAQLLPLLGGALADKWLGRYRTIVIASLLYILGLGMLAFSTFLSSGSGHQCTAAGGQICAPSGLKVTFFYVSLYIVAVAQGGHKPCVQAFGADQFDQTDPKETVSRSSFFNWWYFGMCAGTAVTLVLLSYVQDNIGWGLGFGIPCAVMAAALAVFLFGTRTYRYYVTAEQGLFARAGEAFAEWAEQAQGGPACSGFPRTRSARSRCAKVQVCILCHCMRSTICSRLQSKIIEASSRRPRPSSVCSRYGRHACSTRWRTRSRRRSSRNRRRPWTGGSGGTSRCHLLRCRASSASQSWSSSLSTTASSCRCRAGTPANHQGSPCCSASARGCSSRSCPW

SEQ ID NO: 268 - DNA, 1221 bp, Zea mays
atgcgcgcgccggcgggcggtgccagtgccaccgcgctcgcggcggccatgaacattaagcagccgctgcacggcgcatcgacgctgttcgcgctgctctccctctcgctgctcctcctccgcctgctcctccggctccgcctggccgccttccgcgacgcggcgctgtcgctccacctgctggcgcgcctccgcctccgccccgtcctcctctgcctcccgggcgccggcgccaccacgctgcgcgtctggtgccccgccgccccatcctccaagccgccgctgctcctcctccacggcttcggcggggacgccaagtggacgtgggcgcgcaacctcccgcgactgtcccgccacttccacgcgtacgggccggacctcgtgttcttcggcgcgcagtcccggtccgcgtcgccgctgcgctccgtggcgttccaggcccgctgcgccgccgaggccatgcgcctcctcggcgtgccccgctacgacgtcgcggggatcagctacggcggcttcgtcgcctaccggatggccgccgccgaggccagggacgccgtgggcaggctcgtcatcatgaccaccggcgtcgcggccacgcccggggagatgcgggcgatggcggcgcgcgaggaccgcaccgtcgaggatgcgctgctgccggacaccgccgaggggctgcgcttcctcgtaagacgctccatgcatcgccccccgccttggatgccggacttcgtgcttgacgacttcatccaggtcagtgctcgattttttctttcttccaattattatgttcgtgattttgcactatcgctttctctgcgtgtgtggtttcgtattagttccatattgtttagctacagtacatcatacacatctcccacactttcttttttttcccgtctcatgcagctcatgtacgtggaccagaaaagggaaagggcagagttgctgcacgaactgctcaagaccggagctggcttcgaccccctcccggttcttacccaggaaacactgatcatctggggcgacaaagaccaggtgttccccgtcgacctcggccacaggctgcacaggcttctgggcgagaggtccaggctagagatcgtcagggacgcagggcacgcgctgcagctggagggcgccgaccacgtcaaccgctccatcaagtcgttcctcctggacgagcgggtcggcccgggagccggcgcgggccgcaagtag

SEQ ID NO: 269 - protein, 406 aa, Zea mays
MRAPAGGASATALAAAMNIKQPLHGASTLFALLSLSLLLLRLLLRLRLAAFRDAALSLHLLARLRLRPVLLCLPGAGATTLRVWCPAAPSSKPPLLLLHGFGGDAKWTWARNLPRLSRHFHAYGPDLVFFGAQSRSASPLRSVAFQARCAAEAMRLLGVPRYDVAGISYGGFVAYRMAAAEARDAVGRLVIMTTGVAATPGEMRAMAAREDRTVEDALLPDTAEGLRFLVRRSMHRPPPWMPDFVLDDFIQVSARFFLSSNYYVRDFALSLSLRVWFRISSILFSYSTSYTSPTLSFFSRLMQLMYVDQKRERAELLHELLKTGAGFDPLPVLTQETLIIWGDKDQVFPVDLGHRLHRLLGERSRLEIVRDAGHALQLEGADHVNRSIKSFLLDERVGPGAGAGRK

SEQ ID NO: 270 - DNA, 333 bp, Zea mays
atgcagggcgccagccacatgctcctggaggagcccttccgcctcgcctccgtcctctcccccgccaagcctaaagtattcccatcactcaccaagatagttgggacgctcgggcccaattcacactcggttgagattattcaggaatgcctcactgctggaatgtcagttgcacggtttgatttctcatggatggatgctgcgtatcaccaggagacccttgataatttgaggaaagcggcacagaatgtgaagaaattgtgccctgtaatgttggataccctgggtccagaaattcaagttcacaaattccactgggtgagccaattgagt

SEQ ID NO: 271 - protein, 111 aa, Zea mays
MQGASHMLLEEPFRLASVLSPAKPKVFPSLTKIVGTLGPNSHSVEIIQECLTAGMSVARFDFSWMDAAYHQETLDNLRKAAQNVKKLCPVMLDTLGPEIQVHKFHWVSQLS

SEQ ID NO: 272 - DNA, 1155 bp, Zea mays
atggcggcggcggcaatcgcgaccgtgtccctcagttcagttcctcgcgaaaagcggccccggcactgtgccagtaccttcaacttcaacgcacggcagttcagtaactccagctcccactgccactctttcacgctgagaccaagagtgccaagaccccgagccgcgtgccgggtcatcgtcgcgcaggccggcggcggctacaaggtggccatccttggcgcggcgggaggggtcgggcagccgctgtccctgctggccaagatgtccccgctcgtctcggcgctgcacctgtacgacatcgccgccgacgtggagggcgtggccgccgacctgagccactgcaacaccccggcgcgggtctccggcttcacgggcgaagacgagctcgcggggtgcctgtcgggcgcggacgtcgtggtggtcgccgccggcgtgccgcggaagcccggcatgacgcgggaggacgaccggttcggcgccaacgcgggcgtggtgcgggagctcgtggcggcggtggcggaccacgcgccgccgggcgcgctggtgcacgtgatcagcgacccggtggactcgacggtgccggtcgccgccgaggtgctgaagcacaagggcgcgtacgacccgcggaggctgttgggcgtgacggcgctggacgtggtccgcgccaacgcgttcgtggcggcgcggaagggcctgccgctggcggacgtggacgtgccggtggtgggcggccacgcggcggccaccatcctgccgctgctgtccaaggcgcggcccaaggcggcgttcacggacgatgaggtggaggagctcacggccagggtccgcgacgccggcgccggcgggtccgccacgctgtcgatggcgtacgccgccgcgcggttcctcgaggcgtccctgcgcggcctcgacggccacggcgacgtgtacgagtgcgcgtacgtgcagtcgcaggtggtgccggagctcccgttcttcgcgtgcagggtgaggctcgggagggacggcgtggaggaggtgatgggctccgagctcagggcgctcaccgactacgaggcgcgcgcgctggaggccctcaagcccacgctcaaggccagcatcgacaagggcgtcgcgtacgtgcagcagcaccaggaggcagcgttgaactga

SEQ ID NO: 273 - protein, 384 aa, Zea mays
MAAAAIATVSLSSVPREKRPRHCASTFNFNARQFSNSSSHCHSFTLRPRVPRPRAACRVIVAQAGGGYKVAILGAAGGVGQPLSLLAKMSPLVSALHLYDIAADVEGVAADLSHCNTPARVSGFTGEDELAGCLSGADVVVVAAGVPRKPGMTREDDRFGANAGVVRELVAAVADHAPPGALVHVISDPVDSTVPVAAEVLKHKGAYDPRRLLGVTALDVVRANAFVAARKGLPLADVDVPVVGGHAAATILPLLSKARPKAAFTDDEVEELTARVRDAGAGGSATLSMAYAAARFLEASLRGLDGHGDVYECAYVQSQVVPELPFFACRVRLGRDGVEEVMGSELRALTDYEARALEALKPTLKASIDKGVAYVQQHQEAALN

SEQ ID NO: 274 - DNA, 1764 bp, Zea mays
atgtgtggcatcttagccgtgctcggttgctccgactggtctcaggcaaagagggctcgcatcctcgcctgctccagaaggttgaagcacaggggccccgactggtcgggcctctaccagcacgagggcaacttcctggcgcagcagcggctcgccgtcgtctccccgctgtccggcgaccagccgctgttcaacgaggaccgcaccgtcgtggtggtggccaatggagagatctacaaccacaagaacgtccggaagcagttcaccggcacacacaacttcagcacgggcagtgactgcgaggtcatcatccccctgtacgagaagtacggcgagaacttcgtggacatgctggacggggtgttcgcgttcgtgctctacgacacccgcgacaggacctacgtggcggcgcgcgacgccatcggcgtcaacccgctctacatcggctggggcagtgacggttccgtctggatcgcgtccgagatgaaggcgctgaacgaggactgcgtgcgcttcgagatcttcccgccgggccacctctactccagcgccggcggcgggttccggcggtggtacaccccgcactggttccaggagcaggtgccccggatgccgtaccagccgctcgtcctcagagaggccttcgagaaggcggtcatcaagaggctcatgactgacgtcccgttcggggtcctcctctccggcggcctcgactcctcgctcgtcgcctccgtcaccaagcgccacctcgtcgagaccgaggccgccgagaagttcggcaccgagctccactcctttgtcgtcggcctcgagggctctcctgacctgaaggccgcacgagaggtcgctgactaccttggaaccatccatcacgagttccacttcaccgtacaggacggcatcgacgcgatcgaggaggtgatctaccacgacgagacgtacgacgtgacgacgatccgggccagcacgcccatgttcctgatggctcgcaagatcaagtcgctgggcgtgaagatggtgctgtccggggagggctccgacgagctcctgggcggctacctctacttccacttcgcccccaacaaggaggagttccacagggagacctgccgcaaggtgaaggccctgcaccagtacgactgcctgcgcgccaacaaggccacgtcggcgtggggcctggaggtccgcgtgccgttcctcgacaaggagttcatcaacgtcgcgatgggcatggaccccgaatggaaaatgtacgacaagaacctgggccgcatcgagaagtgggtcatgaggaaggcgttcgacgacgacgagcacccttacctgcccaagcatattctctacaggcagaaagaacagttcagtgacggcgttggctacaactggatcgatggcctcaaatccttcactgaacagcaggtgacggatgagatgatgaacaacgccgcccagatgttcccctacaacacgcccgtcaacaaggaggcctactactaccggatgatattcgagaggctcttccctcaggactcggcgagggagacggtgccgtggggcccgagcatcgcctgcagcacgcccgcggccatcgagtgggtggagcagtggaaggcctccaacgacccctccggccgcttcatctcctcccacgactccgccgccaccgaccacaccggcggtaagccggcggtggccaacggcggcggccacggcgccgcgaacggcacggtcaacggcaaggacgtcgcagtcgcgatcgcggtc

SEQ ID NO: 275 - protein, 588 aa, Zea mays
MCGILAVLGCSDWSQAKRARILACSRRLKHRGPDWSGLYQHEGNFLAQQRLAVVSPLSGDQPLFNEDRTVVVVANGEIYNHKNVRKQFTGTHNFSTGSDCEVIIPLYEKYGENFVDMLDGVFAFVLYDTRDRTYVAARDAIGVNPLYIGWGSDGSVWIASEMKALNEDCVRFEIFPPGHLYSSAGGGFRRWYTPHWFQEQVPRMPYQPLVLREAFEKAVIKRLMTDVPFGVLLSGGLDSSLVASVTKRHLVETEAAEKFGTELHSFVVGLEGSPDLKAAREVADYLGTIHHEFHFTVQDGIDAIEEVIYHDETYDVTTIRASTPMFLMARKIKSLGVKMVLSGEGSDELLGGYLYFHFAPNKEEFHRETCRKVKALHQYDCLRANKATSAWGLEVRVPFLDKEFINVAMGMDPEWKMYDKNLGRIEKWVMRKAFDDDEHPYLPKHILYRQKEQFSDGVGYNWIDGLKSFTEQQVTDEMMNNAAQMFPYNTPVNKEAYYYRMIFERLFPQDSARETVPWGPSIACSTPAAIEWVEQWKASNDPSGRFISSHDSAATDHTGGKPAVANGGGHGAANGTVNGKDVAVAIAV

SEQ ID NO: 276 - DNA, 1548 bp, Zea mays
  misc_feature 956, 957, 958, 974, 1504, 1512: n = A,T,C or G
  misc_feature 956, 957, 958, 974, 1504, 1512: n = A,T,C or G
atgcgcatcgtggtgccgctgcagggggtggtgcagggccggggcggcctggtgctcggctccctcatcccctgcgcgctcttctacttcttccagctctacatcaagcgcaaccgccccgcgccggcgccggcgccggcgccggcgccgggctccccgccgcccgcggccgcctccccgatcctccgctcccactcgcggggcctcctcacgccgcgcgccgcgctgccgtcgctctccgcgcgcggggccgtcgtgcgggccggggacgaggactcgctctactacgccggtctccgtcggtgcgccgccgacccttaccaccccgcgtccaaccccgacggtgtcgtcaacctcggcctcgccgagaaccacctgtcgctggatttggtggggcggtggatggaggagcacgcgggggcggcgatgctggacggcctcgcggcagccggggacgaggtcagggacctcaccatcagggggctcgcaacctaccagccctacgatgggatacttgccttgaagatggctcttgctggattcatgcggcagaccatgcatggatcagtatcctttgatccatctcaaatggtgattacatgtggggcaactcctgcaatggaaatactgagtttctgtattgctgatccaggaaatgcatttcttgtgccatcaccttactacccgggttgggatagggacataaaatggcgaactggtgttgagttgatacctgttccttgtcgtagtactgataactttaatgtcagtgtcactgctcttgaaatagcttacaaacaggcaaaaaagcgaggaataagagttcgtggggttctcatatctaacccttccaacccaacaggaggcattgtgccaaaagaaatactgcatgaccttctacagtttgctgcagagaagaacatacacttaatttctgatgaaatatttgctggttnnncatatggaagtgacangtttgttagcgtggcagatgttgtggatgaactagaggactttgataaaggcagagttcatatcatatatgggctctcaaaagacctatctcttgccgggtttcgagttggagtgatatattcctacaatgaacacattgtatcggctgctgctaagattgctcgattttcatctgtctcaagtccaacacaacgtttgcttgtttccatgctttcagatcaaaagtttatttcagaatacataaaggttaacagagagaggctccggaaaatgtaccttctgttttctgatgctttgaaacaacttgggatagaatgcttcaagagcagcggcgggttctattgctgggcagacatgagcaggtacatccgatcttacagcgagaaaggagagcgcaagctctgggataggctgttggaggaagcaaaggtcaacgttaccccaggttcttcttgccattgcattgagcctggatggttcaggtgttgcttcacaacattgagtgaggaggacattcctgtcttggtgnaaagactnaggagggtcacagatagcttcaaatccaaacgttga

SEQ ID NO: 277 - protein, 515 aa, Zea mays
  VARIANT 319, 320, 325, 502: Xaa = Any Amino Acid
  VARIANT 319, 320, 325, 502: Xaa = Any Amino Acid
MRIVVPLQGVVQGRGGLVLGSLIPCALFYFFQLYIKRNRPAPAPAPAPAPGSPPPAAASPILRSHSRGLLTPRAALPSLSARGAVVRAGDEDSLYYAGLRRCAADPYHPASNPDGVVNLGLAENHLSLDLVGRWMEEHAGAAMLDGLAAAGDEVRDLTIRGLATYQPYDGILALKMALAGFMRQTMHGSVSFDPSQMVITCGATPAMEILSFCIADPGNAFLVPSPYYPGWDRDIKWRTGVELIPVPCRSTDNFNVSVTALEIAYKQAKKRGIRVRGVLISNPSNPTGGIVPKEILHDLLQFAAEKNIHLISDEIFAGXXYGSDXFVSVADVVDELEDFDKGRVHIIYGLSKDLSLAGFRVGVIYSYNEHIVSAAAKIARFSSVSSPTQRLLVSMLSDQKFISEYIKVNRERLRKMYLLFSDALKQLGIECFKSSGGFYCWADMSRYIRSYSEKGERKLWDRLLEEAKVNVTPGSSCHCIEPGWFRCCFTTLSEEDIPVLVXRLRRVTDSFKSKR

SEQ ID NO: 278 - DNA, 348 bp, Zea mays
atgtcgacggtgagccgtgcgtccctcgaccagaagctcgccctcgccaagcgctgctcccgagaggcgaccctcgccggagccaaggcggcagccgtggcgactatcgcctccgcgatccccaccctggccagcgtgcggatgctgccatgggccaaggccaacatcaaccccaccggccaggcgctcatcgtctccacggtggctgggatggcctacttcatcgccgccgacaagaagatcctgtcgctggcgaggcgccactcgttcgagcaagcccctgaccacctcaagaacacctccttccagggcaccggccgtccccacccggctttcttcaggccgtga

SEQ ID NO: 279 - protein, 115 aa, Zea mays
MSTVSRASLDQKLALAKRCSREATLAGAKAAAVATIASAIPTLASVRMLPWAKANINPTGQALIVSTVAGMAYFIAADKKILSLARRHSFEQAPDHLKNTSFQGTGRPHPAFFRP

SEQ ID NO: 280 - DNA, 2796 bp, Zea mays
atgaagtccatgctccaggtttggggcatcttctgctgtgtgtgttcctgtgcacttggacaaaatacttctgcgcggcccagtgtcgtgaacgttggagctctcttcacgttccactcgacgattgggagagccgccaaggtggccatcgctgctgcggtcaatgacatcaacagagatccaagcgttcttcaggggacgaagctggttgttcagatgcaagataccaactacagcggtttcatcagcattgttcaagccttgcaattcatggagaaagacacgatcgcgatcatcgggccacagtcttcagtcgttgcgcacgtcatatcccacgtcgcaaatgaactccaggtgcctctgatgtccttcgctgcaaccgatccgactctgacaccgcttcagtatcctttctttgtgcgcactgtccacagcgaccagttccagatggcttccgtggctgcgatagttgattactacgggtggaagatggtgacagccgtgtacatcgatgacgactacggaagaaacggcgtgtcctccttagacgacgagcttgccaagaggagactgaagatcctgtacaaagctgcgatcaggccaggggcaagaaagagcgagatggccgccgtgctggtcaaggctgcgatgatggagtcccgggttttcgtgctgcacgcgcgtgacgattctggaatcgacgtgttctcgctggcgtacaatctgagcatgacatccggtggatacgtgtggatcgcgacagattggctcaccgcgtgcctcgactcagctcctcgtcttggaactggattactgaacacgatgcagggtgttctcacgttgcgtcagcacacggagaacaccagtaggaagaaggcgttggtttcgcgatggagtgaagtggcgaaggaggaggaggaggaggacggcggcagcttgcccaatacctatggcctctatgcttatgacactgtctggatgcttgcccatgggttggatgcgtttttcaacagtggcggaaacatttccttctctccagaccccagactgcgtgcggttgtaggaggagctctgaatctggacgcactgagcgtcttcgacgaggggacgctgttgctagaaagaatccgcaacgtgagtttcatgggtgcgactggccctgtaaagttggactcagatggtaaccttatccagcctgcatatgacattgtaaacgtagtagggtctggtttgaggacgattggctattggtccaactactctgggctgtccgttgtgtcccctgagactctgtacaagaaaccattcaatgtcagtgcaaaccaggagctccacgctgccatctggccaggcgagactgtaacgaggccccggggatgggtgttccctaacaacgggaatgagctgaggattggagttcccgacagggtaagctaccgtcagtttatatcagtagacaatcaaactggaacggtgggaggtttctgcatcgatgtgtttgctgctgcgataaacctgctgcagtacccagtcacatataggtttgtgccttttggcaatggccgtgagaatccaagctacacggaacttatcggtcgaattctgacgaatgaatttgatgctgttgttggggatgtagctattgtcacgaatcggacaaaagttgttgatttcacccagccatacgttgcttctggcctcgtcatacttaccgccgtcaagacacagagctcggatgcatgggctttcctgcagccgtttaccatcagaatgtggtctgtgacaggggtgttctttctggtcgtaggagcagtgatttggttgctcgagcacagaatcaacgacgacttccgtggtcctccagcgaagcaggttattactgttttctggttcagtttctcaactctgttctttgcccacagagaggacacgaggagcacgctgggccgcgtcgtggtcatcatctggctgttcgtagtcctgatcatccagtccagctacaccgcgagcctgacctccatcctcaccgtgcagcagctgacgtccccgatcaagggcatcgacagcctgatcgccagcgacgagcccatcgggttccaggttgggtccttcgcggagagctacctggtgcacgagctgggcgtctccccgtccaggctcaaggcgctcggcaccccggacgagtacaagaacgcgctagagctcgggcctcgcaagggaggcgtcgtggccatcgtcgacgagcgcccgtacgtcgaggtcttcctggtgcagcacgacaagttcgccatcgtgggcgcggagttcaccaagagcggctggggcttcgcgttcccgcgtgactcgcctctggccgtggacctgtcgacggcgatcctggcgctgtcggagaacggcgacctgcagaggatccacgacaagtggctgtcgaacgggccgtcgccccagtccacgaccgacctggagccggaacggctgcgggtgcagagcttctcggcgctgttcctcctctgcggcgcggcgtgcctcgcggcgctggccatccacggctgcatcctggcccggcagtactccctccacgtggcgtcccagccgccggacgcggtggccacgggggccgacggcgccatccgccgctccagccgcagcagcatccggtcgttcctgtccttcgcggaccgccgggaggcgcagtgcccgagggggagctgcaaggaccccgccgcggcgctgggagggtcctccagcagcggcgtcagcagcttcacgtcaagcaacgccagcgtatcgaggtag

SEQ ID NO: 281 - protein, 931 aa, Zea mays
MKSMLQVWGIFCCVCSCALGQNTSARPSVVNVGALFTFHSTIGRAAKVAIAAAVNDINRDPSVLQGTKLVVQMQDTNYSGFISIVQALQFMEKDTIAIIGPQSSVVAHVISHVANELQVPLMSFAATDPTLTPLQYPFFVRTVHSDQFQMASVAAIVDYYGWKMVTAVYIDDDYGRNGVSSLDDELAKRRLKILYKAAIRPGARKSEMAAVLVKAAMMESRVFVLHARDDSGIDVFSLAYNLSMTSGGYVWIATDWLTACLDSAPRLGTGLLNTMQGVLTLRQHTENTSRKKALVSRWSEVAKEEEEEDGGSLPNTYGLYAYDTVWMLAHGLDAFFNSGGNISFSPDPRLRAVVGGALNLDALSVFDEGTLLLERIRNVSFMGATGPVKLDSDGNLIQPAYDIVNVVGSGLRTIGYWSNYSGLSVVSPETLYKKPFNVSANQELHAAIWPGETVTRPRGWVFPNNGNELRIGVPDRVSYRQFISVDNQTGTVGGFCIDVFAAAINLLQYPVTYRFVPFGNGRENPSYTELIGRILTNEFDAVVGDVAIVTNRTKVVDFTQPYVASGLVILTAVKTQSSDAWAFLQPFTIRMWSVTGVFFLVVGAVIWLLEHRINDDFRGPPAKQVITVFWFSFSTLFFAHREDTRSTLGRVVVIIWLFVVLIIQSSYTASLTSILTVQQLTSPIKGIDSLIASDEPIGFQVGSFAESYLVHELGVSPSRLKALGTPDEYKNALELGPRKGGVVAIVDERPYVEVFLVQHDKFAIVGAEFTKSGWGFAFPRDSPLAVDLSTAILALSENGDLQRIHDKWLSNGPSPQSTTDLEPERLRVQSFSALFLLCGAACLAALAIHGCILARQYSLHVASQPPDAVATGADGAIRRSSRSSIRSFLSFADRREAQCPRGSCKDPAAALGGSSSSGVSSFTSSNASVSR

SEQ ID NO: 282 - DNA, 861 bp, Zea mays
atggctggtgacgaccatgtggtggttgacgtgaacggcttagcaaaatccaaggatgacgggggttccaagaagctgtctgaggatgcaaatggttcggctccggctgctgcatctttgtcagcagctgttgacttggtccaggaggaggaggaggaggagggtgatggggaggaggagccgctaatccaggccgcggagtgccgcatatgccaggaggaagatagcgtgaagaacctcgagaaaccgtgtgcttgcagcggcagtctcaagtatgctcacagagcttgcgtgcaacgctggtgcaacgagaaaggagacactacttgtgaaatttgtcatgaggaatacaagccaggttacactgcgccacctcgtgttcagccagatgagacaaccatagacattgatggtgatttggttatggatttgcgagacccaaggattcttgctgtagcagctgcccaacatcgtcttcttgaggcagagtatgatggttacgctagtacagatgctagtggtgctgcattctgccgttcagctgcgcttattttaatggcactgttgcttctaaggcatgcattgtctatgtcagacaacgaaggaaacgatgatgacgcttctaccatattctcgctttttctgcttcgagctgctgggtttctgctgccgtgctacatcatggcatggatattcagtattttgcatcgccgtcgacaaagacaggaagaggctgcactggcggctgcagaggtggccttcatcctacagtcggccaggggccgcgccctccagtttgccatcgctccagactcccccgccaccccgcagcatgagccagtgtcgcagcaacagcaatag

SEQ ID NO: 283 - protein, 286 aa, Zea mays
MAGDDHVVVDVNGLAKSKDDGGSKKLSEDANGSAPAAASLSAAVDLVQEEEEEEGDGEEEPLIQAAECRICQEEDSVKNLEKPCACSGSLKYAHRACVQRWCNEKGDTTCEICHEEYKPGYTAPPRVQPDETTIDIDGDLVMDLRDPRILAVAAAQHRLLEAEYDGYASTDASGAAFCRSAALILMALLLLRHALSMSDNEGNDDDASTIFSLFLLRAAGFLLPCYIMAWIFSILHRRRQRQEEAALAAAEVAFILQSARGRALQFAIAPDSPATPQHEPVSQQQQ

SEQ ID NO: 284 - DNA, 1782 bp, Zea mays
atggagatgtcagccatggaggaagccctccccaaggcgatggagaggaggaagggaggcctcagaaccattccgttcatcatcttaaacgagatattcgagaaggtggccacgttcgggctgtcggccaacatgatcctgtacctcaccgagcggtatctcatgaccaacgcctttgccaccgtcgtcctctacttctggcatgccttctccaacttcctgcccatcttaggcgccgtgctcgccgacgcccgcctcggccggttccgggtcatcaccctcggctcctgcgttagcctcttcgggatgtgcctgctgtggctgacggcgatccttccggtgtacaagaacaccccggagtgcgcgccggggcggccggtagggtgcgcggtgctgccgtggcagctgccgctcctcttcacgtcgttcgcgttcatgtccctcgggtcgggcggcatccggccctgcacgctggcgttcggggccgaccagctggacaagcgggacaacagcgccaataacgtgaggacgctgcagaccttcttcaactggtactacacggtgctgggcctctccatcgtgttcgcgtccaccgtcatcgtgtacatccagcaggccaggggctgggtcgtcggcttcgccgtgcccgtcgtgctcatggtcaccgcgctcacgctgttcctcctgggctcgcccttctacatcaaggcggcggccaacagcagcgtcgtcatcggcttcgtgcaggtgctcgtcgccagctacaataaccgccacgagcccttgccgccggagactgccgactcctcgagcttctacaacaaagcaggctgcaaacctaggactcccacgaacaagctaatgtacttgaaccgggcttgcgtgctcaggaacccgagcaaggagatcagccccgacggggcggcgtgcgatccgtggaggctgtgcacggtgcagcaggtggaggacaccaaggccgtcatccgcgtgcttccgatatggtcgacggggatcatgccgggcgtggtcgtcgggcagcagatgttcccgacgctgcaggcgaagacgatggagcggagggtgggcaagctggagatcccccctgcctccttcggcgtcttcgccatcctgacgctcaccgtctgggttgccgtgtacgaccgcgtgctggtgcggcccctgtcccggctcaccggccacgcgcgcgggctcagcctgcggcagcggatgggcgccggcctggtgctcttcgccgtggccatggccgtggccgcgcacaccgagagcgtccgccgagccgccgcgctcgccgaggggctccgcgactccaacccgctgacgggggagcgcccggtgcgcatgtcggccatgaatctggtgccgcagcactgcctcacggggctcgccgagggcctgaacctgatcgggcagatcgagttctactactccgagttccccaagaccatgtccagcataggggtgtccctgctcgcgctcggcctcgggtttggcgccgtgctgggcagcgccatcgtcggggtcatcgacgcggggacccggagcggcggcagccacgacggctggctgccgagcaacctgaacagggggcactacgactactactacttggtactggcggtgctatgcgccgccaacgtgctgtacttcgcagtgtgtggctgggcatacggcgacgaggggcaaaaccgggtggtggccgccgacgccgcggtggacgacgtcgacgacaaggaggaggagcaaaaggcggtaatcatctag

SEQ ID NO: 285 - protein, 593 aa, Zea mays
MEMSAMEEALPKAMERRKGGLRTIPFIILNEIFEKVATFGLSANMILYLTERYLMTNAFATVVLYFWHAFSNFLPILGAVLADARLGRFRVITLGSCVSLFGMCLLWLTAILPVYKNTPECAPGRPVGCAVLPWQLPLLFTSFAFMSLGSGGIRPCTLAFGADQLDKRDNSANNVRTLQTFFNWYYTVLGLSIVFASTVIVYIQQARGWVVGFAVPVVLMVTALTLFLLGSPFYIKAAANSSVVIGFVQVLVASYNNRHEPLPPETADSSSFYNKAGCKPRTPTNKLMYLNRACVLRNPSKEISPDGAACDPWRLCTVQQVEDTKAVIRVLPIWSTGIMPGVVVGQQMFPTLQAKTMERRVGKLEIPPASFGVFAILTLTVWVAVYDRVLVRPLSRLTGHARGLSLRQRMGAGLVLFAVAMAVAAHTESVRRAAALAEGLRDSNPLTGERPVRMSAMNLVPQHCLTGLAEGLNLIGQIEFYYSEFPKTMSSIGVSLLALGLGFGAVLGSAIVGVIDAGTRSGGSHDGWLPSNLNRGHYDYYYLVLAVLCAANVLYFAVCGWAYGDEGQNRVVAADAAVDDVDDKEEEQKAVII

SEQ ID NO: 286 - DNA, 513 bp, Zea mays
atggcgcccaccgtgatgatggcctcgtcggcaaccgccgtcgccccgttccagggtctcaagtccgccgccagcctccccgtcgcccgccgcagcaccaggagcctcggcaacgtcagcaacggcggaaggatccggtgcatgcaggtgtggccggcctacggcaacaagaagttcgagacgctgtcgtacctgccgccgctgtcgacggacgacctgctgaagcaggtggactacctgctgcgcaacggctggataccctgcctcgagttcagcaaggtcggcttcgtgtaccgcgagaactccacctccccgtgctactacgacggccgctactggaccatgtggaagctgcccatgttcggctgcaacgacgccacccaggtgtacaaggagctgcaggaggccatcaaatcctacccggacgccttccaccgcgtcatcggcttcgacaacatcaagcagacgcagtgcgtcagcttcatcgcctacaagccccccggcagcgactag

SEQ ID NO: 287 - protein, 170 aa, Zea mays
MAPTVMMASSATAVAPFQGLKSAASLPVARRSTRSLGNVSNGGRIRCMQVWPAYGNKKFETLSYLPPLSTDDLLKQVDYLLRNGWIPCLEFSKVGFVYRENSTSPCYYDGRYWTMWKLPMFGCNDATQVYKELQEAIKSYPDAFHRVIGFDNIKQTQCVSFIAYKPPGSD

SEQ ID NO: 288 - DNA, 861 bp, Zea mays
atgaggcaaggcatgagctccccttccgccgccgcggcgctcgtgctcctcctggccctgctcgccggaggccagtgccgagaggcccagctcgacgccgcggacgccggcaccggcacggagaactacaccgccagcgacgccgccgtgtactggggcccctggcagagggcccgggccacctggtacggccagcccaacggcgccggccccgacgacaacggtggcgcgtgcggattcaagcacaccaaccagtaccccttcatgtccatgggctcctgcggcaaccagccattgttcaaggacggcaagggctgcggctcctgctacaagattcggtgcaggaaggacccgtcctgctccgggcggacggagacggtgatcatcaccgacatgaactactacccggtgtccaagtaccacttcgacctcagcggcactgcgttcggcaggctggccaagcccggcctcaacgacaagctccgccactccggcatcatcgacatcgagttcaccagggtgccgtgcgagttcccgggcctgaagatcgggttccacgtggaggagtactcgaaccccgtctacttcgcggtgctggtggagtacgaggacggcgacggcgacgtggtgcaggtggacctgatggagtccaagacggcgcgcggcccgccgacggggcggtggacgccgatgcgcgagtcctggggctccgtctggcgcatggacaccaaccaccgcatgcagccgcccttctccatccgcatccgcaacgagtccggcaagacgctcgtcgccaacaacgtcatcccggccaactggcgccccaacaccttctaccgctccttcgtccagtacagctaa

SEQ ID NO: 289 - protein, 286 aa, Zea mays
MRQGMSSPSAAAALVLLLALLAGGQCREAQLDAADAGTGTENYTASDAAVYWGPWQRARATWYGQPNGAGPDDNGGACGFKHTNQYPFMSMGSCGNQPLFKDGKGCGSCYKIRCRKDPSCSGRTETVIITDMNYYPVSKYHFDLSGTAFGRLAKPGLNDKLRHSGIIDIEFTRVPCEFPGLKIGFHVEEYSNPVYFAVLVEYEDGDGDVVQVDLMESKTARGPPTGRWTPMRESWGSVWRMDTNHRMQPPFSIRIRNESGKTLVANNVIPANWRPNTFYRSFVQYS

SEQ ID NO: 290 - DNA, 1797 bp, Zea mays
atgggcggtgaggtgccggagccgcgccggctgagccgcgcgctcagcttcggctgcggcggcgtccccgaggaggcgctgcacctcgtgttcggctacatggacgacccgcgagaccgggaggcggcctcgctcgtgtgccgcctctggcaccgcatcgacgcgctctcgcgcaagcacgtcaccgtgggcttctgctacgccgtggagcccgcgcggctgctcgccaggttcccgcggctcgagtcgctcgcgctcaaggggaggccccgcgccgccatgtacgggctcatccccgaagactttggcgcctacgcggcgccctgggtcgccgagctcgccgcgccccttgactgcctcaaggcgctccacctgcgtcgcatgaccgtcaccgacgaggacatcgccgtgctcgtccacgcgcgcggccacatgctacaggcgctcaagctcgacaagtgctccggcttctcaacagacgccctccgcctcgtcgcgcgctcctgcaggtatctgagaaccttgttcctggaagaatgtataattgaggatgaagggagtgaatggctccatgaactcgctgtcaacaattctgttctggtgacactgaacttttacatgacagaactcaaagtggagcctgctgatctggagcttcttgcaaagaactgtaaatcattgatttctttgaagatgggtgactgtgatctttcagatctgattgggtttttccaaacctccaaagcattgcaagaattcgccggaggtgccttttttgaagttggagagtacaccaagtacgaaaaggtcattttcccacctaggctatgcttcttagggggtcttaccttcatgggtaaaaacgagatgccagttatctttccgtattccacaatgcttaagaaactggacttgcagttcactttcctcaccactgaagaccactgtcagcttattgctaaatgccccaacctaagtgttctcgaggtgaggaatgtgattggggatagaggactagaagttgttgctgctacatgcaagaagctacgaaggctcagaattgagcgtggcgacgatgatcctggccaagaagagcagggaggagtctctcagataggtttgacagccgtagccgttggctgccgcgaactagagtacatagctgcctatgtatctgatatcacaaatggggcgctggaatccattggcactttctgcaagaatctatatgatttccggcttgttctacttgacaaacagaagaagataacagacctgccacttgacaacggcgtccgtgccctactgaggaactgcgtcaaacttcggaggtttgccttctacctgagacctggagggctttcagacgtaggcctcggttacattggactatacagtgggaacatccaatacatgctactcggcaacgttggtgaatctgacaacggattgatccagtttgcaacgggatgcaccaacctgcggaagctcgagctgaggggctgctgcttcagcgagcgagctctggcagtggccgtgctccagatgccctcgctgaggtacatatgggtgcaggggtacagagcctctcgaacgggccaggacctcatgctcatggccaggccgtactggaacattgaattcgcgcctcccagtcccgagagcgcttatcgggtgatggcagatggacagccttgtgttgacacccatgcccaggtccttgcgtattactcccttgctggaaggaggccggactgccctcagtggctggtgactttgcaccctgcgtcactgtaa

SEQ ID NO: 291 - protein, 598 aa, Zea mays
MGGEVPEPRRLSRALSFGCGGVPEEALHLVFGYMDDPRDREAASLVCRLWHRIDALSRKHVTVGFCYAVEPARLLARFPRLESLALKGRPRAAMYGLIPEDFGAYAAPWVAELAAPLDCLKALHLRRMTVTDEDIAVLVHARGHMLQALKLDKCSGFSTDALRLVARSCRYLRTLFLEECIIEDEGSEWLHELAVNNSVLVTLNFYMTELKVEPADLELLAKNCKSLISLKMGDCDLSDLIGFFQTSKALQEFAGGAFFEVGEYTKYEKVIFPPRLCFLGGLTFMGKNEMPVIFPYSTMLKKLDLQFTFLTTEDHCQLIAKCPNLSVLEVRNVIGDRGLEVVAATCKKLRRLRIERGDDDPGQEEQGGVSQIGLTAVAVGCRELEYIAAYVSDITNGALESIGTFCKNLYDFRLVLLDKQKKITDLPLDNGVRALLRNCVKLRRFAFYLRPGGLSDVGLGYIGLYSGNIQYMLLGNVGESDNGLIQFATGCTNLRKLELRGCCFSERALAVAVLQMPSLRYIWVQGYRASRTGQDLMLMARPYWNIEFAPPSPESAYRVMADGQPCVDTHAQVLAYYSLAGRRPDCPQWLVTLHPASL

SEQ ID NO: 292 - DNA, 1719 bp, Zea mays
atgccgacggcttcctctgcccaccgctcactcctcctctgcctctgcctggctctgctctccaacccggtcgccgcctcggcctccgcttctccgccaaggcatcgcggcggtggaggccgcgctgccgcgacacggcagcaggcgtcgtcgtccaagaccaccttcttcgaggtcgaccgcccgctccgcccgcccaggggcagctcggggccctgctccacgctgctgctctcgcactccttcgcgttcacgctcaccaagccgcccgtcaccgcggcctactcgccgccgccgtgcctgtccggctccgacgcgccgccggtctcgctcgccgtgctcgagtggcgcgccgagtgccgcggcgcgcagtacgaccgcaccttcggcgtgtggctcggcggcgccgagctcctgcgcggcagcaccgcggagccgcgccccggcggggtggtctggtcggtctccaaggacgtcacccgctacgcggccctcctcgcggccggcaacgccacgctcgctgtctacctcggcaacctcatcgacgacacctacgacggcgtctaccacgccaacctcacgctccacctctacttccgcccgtgcggccgtccgccgccgccgccgcgccgatgccgtcgtcccggtctccaggagcctgccgctcaacgacgggctgtggttcgtcgtccagaacgacaccgacgtgcagtccgcgcgcgtgtcggtgccgcgcaacgcgtaccgcgccgtcctcgaggtctacgtctcgtcccacgacgccgacgagttctggtacatgaacacgcccgagcagaacgggccgttccgcgaggtcaccgtcctgctcgacggcgccgtggtgggcgccgtgtggccgttcccggtgatctacaccggcggcatcaacccgctcatctggcgccccatcaccagcatcggctccttcaacatgcccacctacgacatcgagctcacgcccttcctcggcagcctcctggacggcgaggagcacgagctcgggttcgcggtgaccaacgcgcagcggtcgtggtacgtggacgccaatctccacctgtggctggaccccaagagctccaggaccagcggcgggctcgtcgcgtaccacgcgccgaagctggcgggcagcatcgtgtcgcgctccgcggacggcgtcgacggggagtacgcggcgacggcgagccgcaatatcacggccacggggtgggtgagctcgtcgcgcggcaacgtcaccaccacgttcgcgcagcggctcagcttctccaacaccaacgtggtgagcgggcagggcagcgcgcaggcgatcaaccagacgaccgacgcgctgacggccgtcagcggcgggcccgcgcccgcgcaggtgcaccagagcttcccgctctacatcttcctgggcggcgacggcagcggcacgtcgtcgcagcggctgatgcggcgcgtggagatcgggttcgacgagacgcggtcccggggaggagccgcgtccacgaccacgagcacgctgcggaactcgcaggtggcggcggcggaggtgacgctccgggacgacgccgtggtgggcgcgtcgtggcggatgcaccagacgtacgagtacggcgccagcgacggcggctgctacctgaggaacgtcagcagcgtcggttacgacgtgcttttcgaccatcgcgacgcgtcctgcgcggtacgctgggccgctga

SEQ ID NO: 293 - protein, 572 aa, Zea mays
MPTASSAHRSLLLCLCLALLSNPVAASASASPPRHRGGGGRAAATRQQASSSKTTFFEVDRPLRPPRGSSGPCSTLLLSHSFAFTLTKPPVTAAYSPPPCLSGSDAPPVSLAVLEWRAECRGAQYDRTFGVWLGGAELLRGSTAEPRPGGVVWSVSKDVTRYAALLAAGNATLAVYLGNLIDDTYDGVYHANLTLHLYFRPCGRPPPPPRRCRRPGLQEPAAQRRAVVRRPERHRRAVRARVGAAQRVPRRPRGLRLVPRRRRVLVHEHARAERAVPRGHRPARRRRGGRRVAVPGDLHRRHQPAHLAPHHQHRLLQHAHLRHRAHALPRQPPGRRGARARVRGDQRAAVVVRGRQSPPVAGPQELQDQRRARRVPRAEAGGQHRVALRGRRRRGVRGDGEPQYHGHGVGELVARQRHHHVRAAAQLLQHQRGERAGQRAGDQPDDRRADGRQRRARARAGAPELPALHLPGRRRQRHVVAAADAARGDRVRRDAVPGRSRVHDHEHAAELAGGGGGGDAPGRRRGGRVVADAPDVRVRRQRRRLLPEERQQRRLRRAFRPSRRVLRGTLGR

SEQ ID NO: 294 - DNA, 2085 bp, Zea mays
atgcctgcgctcgccgtcgacgccgcgacacccgtggcgcacgccttcgcgtcctgcgacgcggcgcgcttccccgccccgcccgtggtgggccccgccgccgcggccgaggccgccccctggtcggccgacctctccgcggcgctctacaacgtggacggctggggcgcgccctacttcttcgtcaacgacgacggcgacgtggccgtgcgcccgcacggcgccgcgactctcccgggccaggagatcgacctggccaaggtcgtggccaaggccgcgggcccgcgcgccggaggcgggctcggcctgccgctgccgctgctcgtgcgcttccccgacgtcctgcgccaccgcgtcgagacgctcaacgccgccttcggctacgccgtccgctccaccggctacggctcaaggtaccagggcgtgtacccggtcaagtgcaaccaggacaggtacgtcgtcgaggacattgtggagttcggcgcgccctttgggttcggcctcgaggccggctccaagcccgagctgctgctcgccatgagctgcctcgccgcgcgcggcggcctggacgccctgctcatctgcaacgggtacaaggacgacggctacgtctcgctcgcgctcatggcgcgctccatgggcctcaacaccgtcatcgtgctcgagcaggaggaggagctcgacattgtcgtcgaggccagccgccgcctcggcgtgcgccccgtcgtcggcatgcgcgccaagctgcgcaccaagcacgccggccacttcggctccacgtccggggagaagggcaagttcggcctcagcgccgcgcagatactgtccgtggtcaccaagctcaaggccatcggtatgctcgactgcctccagctgctgcacttccacatcggctcccagatcccgaccaccgccctgctctccgacggcgtcggcgaggccgcgcagatctactgcgagctcgcccgcctcggcgcggacatgcgcgtcatcgacgtcggcggcggcctcggcattgactacgacgggacccactcggcgcagaccgacatgtcggtggcgtacagcctggaggagtacgcgggcgccgtggtggccgccgtgggccgcgtgtgtgaccgcaagggggtgcagcaccccatcatctgcagcgagagcggccgcgcgctggtgtcgcaccactcggtcctggtgttcgaggccttctcggctacggcgccgggacgcctggacgcggccacggcctacctcctcgacgagctcacggacgactgccgcgccgactaccgcaacgtgatggccgccgccgtgcgcggcgactacgacacgtgcggcctgtacgccgaccagctgaagcggcggtccgcggagcagttcaaggagggggtccttggcctggagcacctcgccgcggtggacgccttctgcgagctcgtcgcccgcggcatgggcgcgcccgagccgccgcgcacctaccacatcaacctgtccgtgttcacctccctgccggacatgtgggccatcgggcagcagttccccatcatcccgatccagcggctgcaggagcggcccgccgtcgacggcgtgctctcggacctcacctgcgacagcgacggcaaggtgagcgagttcatcggcgggaggcacagcctgccgctgcacgagctgcccacccacgccactcgcggctactacctgggcatgttcctcgggggcgcctaccaggaggccctcggcgggctgcacaaccttttcggcgggcccagcgtggtgcgcgtgtcccagtgcgacgggccccactgctttgccgtgacgcgcgccgccgcgggcccgtcctgcgccgacgtgctccgcgcgatgcagcacgagcccgaggtgatgtacgaggtgctgaagcagaggaccgacggcgccacggccgccgccctcgcccgggccttcggcgcaatgccgtacctggtgttcgaccccgaggccgccgtgatgtccggcggcgagagcagcgactcggagcggtcggccgccggcgccgccgaggaggaagacgatgaggagtgggagttcatgcgcgggctcaccgtctga

SEQ ID NO: 295 - protein, 694 aa, Zea mays
MPALAVDAATPVAHAFASCDAARFPAPPVVGPAAAAEAAPWSADLSAALYNVDGWGAPYFFVNDDGDVAVRPHGAATLPGQEIDLAKVVAKAAGPRAGGGLGLPLPLLVRFPDVLRHRVETLNAAFGYAVRSTGYGSRYQGVYPVKCNQDRYVVEDIVEFGAPFGFGLEAGSKPELLLAMSCLAARGGLDALLICNGYKDDGYVSLALMARSMGLNTVIVLEQEEELDIVVEASRRLGVRPVVGMRAKLRTKHAGHFGSTSGEKGKFGLSAAQILSVVTKLKAIGMLDCLQLLHFHIGSQIPTTALLSDGVGEAAQIYCELARLGADMRVIDVGGGLGIDYDGTHSAQTDMSVAYSLEEYAGAVVAAVGRVCDRKGVQHPIICSESGRALVSHHSVLVFEAFSATAPGRLDAATAYLLDELTDDCRADYRNVMAAAVRGDYDTCGLYADQLKRRSAEQFKEGVLGLEHLAAVDAFCELVARGMGAPEPPRTYHINLSVFTSLPDMWAIGQQFPIIPIQRLQERPAVDGVLSDLTCDSDGKVSEFIGGRHSLPLHELPTHATRGYYLGMFLGGAYQEALGGLHNLFGGPSVVRVSQCDGPHCFAVTRAAAGPSCADVLRAMQHEPEVMYEVLKQRTDGATAAALARAFGAMPYLVFDPEAAVMSGGESSDSERSAAGAAEEEDDEEWEFMRGLTV

SEQ ID NO: 296 - DNA, 642 bp, Zea mays
atggcgggggcgggggcgaaggcggcgggagccctggctctggcgctcgtgctcgcgctcgcgggggccaactcggagggcgacgcgctctcggcgctgcgccggagcctcagggaccccggcggcgttctgcagagctgggaccccacgctcgtcaacccctgcacctggttccacgtcacctgcgaccgcgacaaccgcgtcacccgcctagatcttggtaatttgaacttatctggtcatctggtgcctgagcttgggaaactggagcatcttcagtatctggaactttataagaataacattcaaggaacaatcccttctgagcttggcaatttgaagaatctaataagcttcgacttgtacaagaacaacatttcggggacaatacctcctgcccttggaaagttgaagtcccttgtattcttgcgtctcaatggcaatcatttgactgggcccatcccaagggaactcgctggaatatctagtctcaaagttgttgatgtttcaagtaatgatttgtgcgggacgattcccacgtctggaccatttgagcatattcctctgagcaactttgagaagaacccgcgcttggaaggtccagagctacaaggcctggccatatacgacaccaactgctag

SEQ ID NO: 297 - protein, 213 aa, Zea mays
MAGAGAKAAGALALALVLALAGANSEGDALSALRRSLRDPGGVLQSWDPTLVNPCTWFHVTCDRDNRVTRLDLGNLNLSGHLVPELGKLEHLQYLELYKNNIQGTIPSELGNLKNLISFDLYKNNISGTIPPALGKLKSLVFLRLNGNHLTGPIPRELAGISSLKVVDVSSNDLCGTIPTSGPFEHIPLSNFEKNPRLEGPELQGLAIYDTNC

SEQ ID NO: 298 - DNA, 702 bp, Zea mays
atggcgccgagaacgtcagagaaaaccatggcaccggcggcggccgctgccacggggctcgcgctcagcgttggcggcggcggcggggccggcggcccgcactacagaggcgtgaggaagcggccgtggggccggtacgcggcggagatccgcgacccggcgaagaagagccgggtgtggctcggcacctacgacacggccgaggacgccgcgcgggcctacgacgccgccgcgcgcgagtaccgcggcgccaaggccaagaccaacttcccttacccctcgtgcgtgcccctctccgcagccggttgccggagcagcaacagcagcaccgtcgagtccttcagcagcgacgcgcaggcgcccatgcaggccatgccgctcccgccgtcgctcgagctggacctgttccaccgcgcggcggccgcggccacgggcacgggcgctgccgccgtacgcttccctttcggcagcatccccgttacgcacccgtactacttcttcgggcaggccgcagccgcagccgcggaagcagggtgccgtgtgctcaagctggcgccggcggtcaccgtggcgcagagcgactccgactgttcgtcggtagtggatctgtcgccgtcgccaccggccgctgtgtcggcgaggaagcccgccgcgttcgatctcgacctgaactgctcaccgccgacggaggcggaagcctag

SEQ ID NO: 299 - protein, 233 aa, Zea mays
MAPRTSEKTMAPAAAAATGLALSVGGGGGAGGPHYRGVRKRPWGRYAAEIRDPAKKSRVWLGTYDTAEDAARAYDAAAREYRGAKAKTNFPYPSCVPLSAAGCRSSNSSTVESFSSDAQAPMQAMPLPPSLELDLFHRAAAAATGTGAAAVRFPFGSIPVTHPYYFFGQAAAAAAEAGCRVLKLAPAVTVAQSDSDCSSVVDLSPSPPAAVSARKPAAFDLDLNCSPPTEAEA

SEQ ID NO: 300 - DNA, 1194 bp, Zea mays
atggccatgaggccacgcgccgcgctcgccctctccctggcagccggcgtcccgctggtcctcctcctcctcctcctcgcgcccggcgcgcgcgccgacgacggcagcggcgggtgcggggcggcgggcggcggcgaggcggcgccgggcgaccgcgcgcgggccagggcgctgaagatcgcggccttcttctccatcctcgtgtgcggggcgctgggctgctgcctgcccgtgctggggcggcgcgtgccggcgctgcgccccgacagggacgtgttcttcctcatcaaggcgttcgcggcgggggtcatcctggccacggggttcatccacatcctccccgacgcgttcgagaagctcacgtccgattgcctctccggcgggccgtggcaggacttccccttcgcggggctcggcgccatggtcggcgccatcggcacgctcgtcgtcgacaccgtcgccacgggctacttcacgcgcgtccacttcaaggacagcgccgccgccgccgtgggcgccgccgccgtcggcgaccaggaaaagcagcagcagcaggcggcgtcggcgccgcacgtcgacgacggagcacacggcgacggccacggccacggcgggcacgtgcacatgcacacgcacgcgacgcacgggcactcgcacggcgcctcggcgctcgtggccgccgtccgcggcgccgagggcgacaaggagcacgcgctgcgccaccgtgtcatcgctcaggttcttgagcttgggattgtggtgcactcggtgatcatcggcatctccctcggcgcgtctcaagaccccagcaccatcaagcctcttgtggtcgccctcagcttccaccaaatgttcgagggcatgggtctaggcggctgcatcgttcaggccaagttcaagctgcggtcgatcgtgacgatggtgctcttcttctgcctgactacgccggtgggcatcgtggtgggcgtcgggatctcgtcggtgtacgacgaggacagccccacggcgctggtcgtggagggcgtgctcaactcggtggcggcggggatcctggtgtacatggcgctggtggacctgctcgccgaggacttcatgaaccccagggtacagagccggggcaagctgcagctcggcatcaacgcctccatgctcgtcggcgccggcctcatgtccatgctggccaagtgggcctag

SEQ ID NO: 301 - protein, 397 aa, Zea mays
MAMRPRAALALSLAAGVPLVLLLLLLAPGARADDGSGGCGAAGGGEAAPGDRARARALKIAAFFSILVCGALGCCLPVLGRRVPALRPDRDVFFLIKAFAAGVILATGFIHILPDAFEKLTSDCLSGGPWQDFPFAGLGAMVGAIGTLVVDTVATGYFTRVHFKDSAAAAVGAAAVGDQEKQQQQAASAPHVDDGAHGDGHGHGGHVHMHTHATHGHSHGASALVAAVRGAEGDKEHALRHRVIAQVLELGIVVHSVIIGISLGASQDPSTIKPLVVALSFHQMFEGMGLGGCIVQAKFKLRSIVTMVLFFCLTTPVGIVVGVGISSVYDEDSPTALVVEGVLNSVAAGILVYMALVDLLAEDFMNPRVQSRGKLQLGINASMLVGAGLMSMLAKWA

SEQ ID NO: 302 - DNA, 678 bp, Zea mays
atggcgatggtgctggggatggtgctggggaagatcccggtggagacgcccaagcacgaggtcctccacaccggcgccggctacgagatccgcaagtacccgcccagcatcgccgcggagttgacctacgatcccaaggagatgagaggagaccctgatggcgggttcaccgtcctcgccaactacatcggggtcctcggaaagccgcagaacaccaagcccgagaagatcgccatgacggctcccgtcatcaccaccggcagcggcagcggcggcgacggcgagaagatcgccatgacggcccccgtcatcaccaccggcggcggcgagcccgagcccatcgcgatgaccgcgccggtgattacggacgaccagcaggcgccgggcaaggtgacaatgcagttcctgctgccgtccaagtacaccagggtggaggaggcgccgcggccgacggacgagcgggtggtgatccgcgaggtgccggagaggaagttcggcgtggcgaggttcagcggggtggccacggacaggacggtgagggagaaggcgaagggacttaaggccgccctggagaaggacgggtacaccatcaaggtcccgttcgtgctggcgcggtacaacccgtcgttcacgctcccgccgctgcgcaccaacgaggtcatgttccccgtcgagtga

SEQ ID NO: 303 - protein, 225 aa, Zea mays
MAMVLGMVLGKIPVETPKHEVLHTGAGYEIRKYPPSIAAELTYDPKEMRGDPDGGFTVLANYIGVLGKPQNTKPEKIAMTAPVITTGSGSGGDGEKIAMTAPVITTGGGEPEPIAMTAPVITDDQQAPGKVTMQFLLPSKYTRVEEAPRPTDERVVIREVPERKFGVARFSGVATDRTVREKAKGLKAALEKDGYTIKVPFVLARYNPSFTLPPLRTNEVMFPVE

SEQ ID NO: 304 - DNA, 2163 bp, Zea mays
atggagtgcgagaccgggcttgtccgctccctgaacggcgagggcctgtgcatgtcggcggcggcggcggcgccgcgcgccgaccccctgaactggggcaaggccgcggaggacctgtccgggagccacctggacgaggtgaagcggatggtggcggagttccgcgacccgctggtgaagatccagggcgccagcctgagcatcgcgcaggtggccgccgtggccgcgggcgccgggggcggcgaggcccgcgtggagctggacgagtccgcccgcgaccgcgtcaaggccagcagcgactgggtcatgagcagcatgatgaacggcaccgacagctacggcgtcaccaccggcttcggcgccacctcccacagcagcaccaaggaaggcggcgcgctccagagggagctcatcagattcctcaatgccggcgcgttcggcacgggcgccgacggccacgtgctgccggcggaggccacccgcgcggcgatgctcgtgcgcgtcaacaccctcctccagggctactccggcatccgcttcgagatcctcgaggccatcgccaagctgctcaacgccaacgtcacgccgtgcctgccgctccggggcaccatcaccgcgtcgggcgacctcgtcccgctctcctacatcgccggcctcatcacgggccgccagaactccgtggcggtggaccccgatggcaggaaggtgggcgccgcggaggcgttcaagatcgcgggcatcgagcatggcttcttcgagctgcagcccaaggaaggtctcgccatggtcaacggcacggccgtgggctctggccttgcgtccaccgtgctcttcgaggccaacgtgctcgccgtcctggccgaggtcatctccgcagtgttctgcgaggtcatgacgggcaagccggagttcaccgaccacctcacgcacaagctgaagcaccaccccggacagatcgaggccgccgcggtcatggagcacatcttggaaggcagctcctacatgaagctggcgaagaggctcggcgagctcgacccgctgatgaagccgaagcaggacaggtacgcgctccgcacctccccgcagtggctcggcccacagatcgaagtcatccgcttcgccaccaagtccatcgagcgcgagatcaactccgtcaacgacaacccgctcatcgacgtgtcccgtggcaaggcgctccacggcggcaacttccagggcacccccatcggtgtgtccatggacaacactcgtctcgcgctcgccgctatcggcaagctcatgttcgcgcagttctcggagctggtgaacgactactacaacaacggccttccctccaacctgtccggtgggcgtaacccgagcttggactacggtttcaagggtgccgagatcgccatggcctcctactgctccgagctccagttcctgggcaacccggtgaccaaccacgtccagagcgctgagcagcacaaccaggacgtgaactccctgggcctcatctcctccaggaagaccgccgaggccatcgacatcctgaagctgatgtcgtccacgttcctgatcgccctgtgccaggccatcgacctgcggcacctcgaggagaacgtgaaggccgcggtgaagaactgcgtgacgcaggtggccaagaagtccctgagcctgaacgccaggggcgggctccacaacgcgcgcttctgcgagaaggacctgcagacggcgatcgaccgcgaggcggtgttcgcgtacgcggacgacccgtgcagccccaactacgcgctgatgcagaagctccgcgcggtgctggtcgagcacgcgctggccaacggcgacgccgagcgcgacgtggacacgtccatcttcgccaaggtggccgagttcgagcagcaggtccgcgcggcgctgcccaaggaggtggaggccgcgcgcgcggccgtggagaacggcagccctctggtccccaacaggatcaaggagtgccggtcctacccgctgtaccggttcgtgcgcgaggaggtcggcaccaagtacctgaccggcgagaagacgaggtcgcccggcgaggagctcaacaaggtgctcgtggccatcaaccagcgcaagcacatcgaaccgctgctcgagtgcctcaaggagtggaacggcgagcccctgccgctctgctga

SEQ ID NO: 305 - protein, 720 aa, Zea mays
MECETGLVRSLNGEGLCMSAAAAAPRADPLNWGKAAEDLSGSHLDEVKRMVAEFRDPLVKIQGASLSIAQVAAVAAGAGGGEARVELDESARDRVKASSDWVMSSMMNGTDSYGVTTGFGATSHSSTKEGGALQRELIRFLNAGAFGTGADGHVLPAEATRAAMLVRVNTLLQGYSGIRFEILEAIAKLLNANVTPCLPLRGTITASGDLVPLSYIAGLITGRQNSVAVDPDGRKVGAAEAFKIAGIEHGFFELQPKEGLAMVNGTAVGSGLASTVLFEANVLAVLAEVISAVFCEVMTGKPEFTDHLTHKLKHHPGQIEAAAVMEHILEGSSYMKLAKRLGELDPLMKPKQDRYALRTSPQWLGPQIEVIRFATKSIEREINSVNDNPLIDVSRGKALHGGNFQGTPIGVSMDNTRLALAAIGKLMFAQFSELVNDYYNNGLPSNLSGGRNPSLDYGFKGAEIAMASYCSELQFLGNPVTNHVQSAEQHNQDVNSLGLISSRKTAEAIDILKLMSSTFLIALCQAIDLRHLEENVKAAVKNCVTQVAKKSLSLNARGGLHNARFCEKDLQTAIDREAVFAYADDPCSPNYALMQKLRAVLVEHALANGDAERDVDTSIFAKVAEFEQQVRAALPKEVEAARAAVENGSPLVPNRIKECRSYPLYRFVREEVGTKYLTGEKTRSPGEELNKVLVAINQRKHIEPLLECLKEWNGEPLPLC

SEQ ID NO: 306 - DNA, 336 bp, Zea mays
atggctgccgccttctccgccgctatcctcttccacctgctgctgctcctcttctcgccgtccgctgcgcagcctggtttcattagcttggactgcgggggagctcgtgatcacacggatgccattgggatccagtggacctctgatgccagcttcgtctctggcggccaggccgcgcagctgctggtccagaatggcctgcagcagacccagcagcagctgaccaccgtgcgctacttccccgcggacaacaggaagcactgctacaccatgaacgtcaggaacaggacgcgctaccttgtgcagggccactttcctctacggcaacttcgataa

SEQ ID NO: 307 - protein, 111 aa, Zea mays
MAAAFSAAILFHLLLLLFSPSAAQPGFISLDCGGARDHTDAIGIQWTSDASFVSGGQAAQLLVQNGLQQTQQQLTTVRYFPADNRKHCYTMNVRNRTRYLVQGHFPLRQLR

SEQ ID NO: 308 - DNA, 1014 bp, Zea mays
atggcgccctgggccattgccatccacggcggcgcgggcgtggacccgaacctcccggagcaccggcaggaggaggcgaagcgcgtgctggcgcggtgcctgcaggtgggcgtggacctgctgcgcgcgggcgcgcaggcgctggacgtcgtggaggccgtggtgcgcgagctggagacggaccccttcttcaactcggggcgcgggtccgcgctcacccgcgccggcaccgtggagatggaggccagcatcatggacggccgcggccgccgctgcggcgccgtgtccggcgtctccaccgtcaagaaccccgtgtccctggcgcgccgcgtcatggacaactcgccccactcgtacctcgccttcgacggcgccgaggagttcgcccgtgcgcagggcctggagaccgtggacaacagctacttcatcacggatgacaacgtcggcatgctcaagctcgccaaggaggccggcagcatcctgttcgactaccggatcccgctggcggggacggacacgtgcagcgcgctggcgggcgcggcggacagcaacggcggcggcgtgcacaaggcggggatggtcatgaacgggctgcccatcagcgtgtacgcgccggagacggtggggtgcgcggtggtggacgcgacgggggcctgcgcggcggccacgtccacgggcgggctcatgaacaagatggccggccgcatcggggactcgccgctcatcggctccggcacctacgcgtgcggcgcctgcgccgtgtcgtgcacgggcgagggcgaggccatcatccgctgcacgctcgcgcgcgacgtggccgccgtcatggagtacaagggcctgcccctgcagcaggccgtcgactactgcgtcaaggagcgcctcgaccagggattcgccggcctcatcgccgtctccggcaccggcgaggtggcgtacggattcaactgcaccggcatgttccggggctgcgccaccgaggacgggttcatggaggtcggcatctgggagtga

SEQ ID NO: 309 - protein, 337 aa, Zea mays
MAPWAIAIHGGAGVDPNLPEHRQEEAKRVLARCLQVGVDLLRAGAQALDVVEAVVRELETDPFFNSGRGSALTRAGTVEMEASIMDGRGRRCGAVSGVSTVKNPVSLARRVMDNSPHSYLAFDGAEEFARAQGLETVDNSYFITDDNVGMLKLAKEAGSILFDYRIPLAGTDTCSALAGAADSNGGGVHKAGMVMNGLPISVYAPETVGCAVVDATGACAAATSTGGLMNKMAGRIGDSPLIGSGTYACGACAVSCTGEGEAIIRCTLARDVAAVMEYKGLPLQQAVDYCVKERLDQGFAGLIAVSGTGEVAYGFNCTGMFRGCATEDGFMEVGIWE

SEQ ID NO: 310 - DNA, 1422 bp, Zea mays
atggcccagactctgtccgccgcctccgagctggccaccctgaagcgcccgttcggcaacgacgggttcggcgatggcagcaacaacggcagcgccaccggcgagaagcccaaggcgcggcggcgggaggcggacccggcggcggcgctggccgcggcgcggcacgagttcggcgagcacggcggcgtgaacatgtccatcgaggcgtcggcgacgttcacggtgatggagccggacacgatgcggcggctgttcgcgggcgagctgggccccgaccgcggcgacatgtacatctacagccggcacttcaacccgacggtgctggcgctggggcggcagatggcggcgctggagggcacggaggcgggctactgcacggcgtccgggatgtccgccatctcgtccgtgctgatgcagctggtgggcgccggcgggcacgtggtggcgtcgcggtgcctgtacggcgggacacacgcgctgctggcccggttcctgccgcgcgcctccggggtgcgcgccaccttcgtggacgccgacgacgaggccgccgtgcgcgccgcggtggtccccggcgagacgcgggtggtgtacgtggagaccatgtccaacccgacgctcgccgtcgccgacatccccatgctggcgcgggtggcgcacgaggccggcgccaagctcgtggtggacaacaccttcacccccgtggtggtgtcgcccgcgcgcctcggcgccgacgtcgtcgtccacagcgtctccaagttcatcagcggcggcgccgacatcatcgccggcgcgatctgcgggccggcgagcctggtgaacgcgatgatggacctgcaggagggggcgctgatgctgctgggccccacgatgaacgccaaggtggcgttcgagctgtcggagcggctgccgcacctgccgctgcggatgcaggagcactcgcgccgcgcgctggcgttcgccgagcggatgcaggggctgggcctgcgcgtgctgtacccgggcctcccgggccacccgcaccacgcgcgcctggccgccatgggcaacccgggctacggctgcggcggcatgctgtgcctcgacatgggcaccgaggagcgcgccaaccgcctcatgcaccacctccagaacaccacccagttcggcctcatggccgtcagcctcggctactacgagacgctcatgtcctgctccggcagcagcaccagcagcgagatgccgcccgaggaccgcgcgcgcgcgggcatctccccgggcctcgtccgcatgtccgtcggctacaacggcacgctggagcagcgctgggcgcagttcgagcgcgcgctcgcgctcatgcagacgccgacgcccacgcaccacctcaagcaggccgccgaccgcgacggccccgaagccgccaacaaccaccaccgcaagcactga

SEQ ID NO: 311 - protein, 473 aa, Zea mays
MAQTLSAASELATLKRPFGNDGFGDGSNNGSATGEKPKARRREADPAAALAAARHEFGEHGGVNMSIEASATFTVMEPDTMRRLFAGELGPDRGDMYIYSRHFNPTVLALGRQMAALEGTEAGYCTASGMSAISSVLMQLVGAGGHVVASRCLYGGTHALLARFLPRASGVRATFVDADDEAAVRAAVVPGETRVVYVETMSNPTLAVADIPMLARVAHEAGAKLVVDNTFTPVVVSPARLGADVVVHSVSKFISGGADIIAGAICGPASLVNAMMDLQEGALMLLGPTMNAKVAFELSERLPHLPLRMQEHSRRALAFAERMQGLGLRVLYPGLPGHPHHARLAAMGNPGYGCGGMLCLDMGTEERANRLMHHLQNTTQFGLMAVSLGYYETLMSCSGSSTSSEMPPEDRARAGISPGLVRMSVGYNGTLEQRWAQFERALALMQTPTPTHHLKQAADRDGPEAANNHHRKH

SEQ ID NO: 312 - DNA, 714 bp, Zea mays
atgtctcagttgctgcacctgccggacctcgcggcgccgcggaccaggatgggctcggcgctggcggcgggggcccgcgtcaagcagggggaggcggggacggcgagggggcgggtgctcagggtcgccgaccccgtgcggcgggagtgcctggtgccggtcccgccgccgccggtcctcgccgcggggaggcgcggagacgacgacgacgtcgacgaggagaggcagcggtactacctcaacctgggctacgcgatccggacgctcagggaggagctccccgacgtgctctgcaaggaccacagcttcgacatctacagagaagacattgtcttcagagaccctctcaacacattcaagggcctgggaaactacaagaggctcttctgggcgctgcgcctcaccggccgggtcttcttcagggcgtcgtgggttgaagtggtcagcatatggcagcccgccgagaacagcatcctgcttcgctggaccgcccacggcgtccctcgggtgccctggggctggtgggacgccgcccacgcccgcttcgacggcgcgtccgtgtacaagctcgacaggaacggcaagatctacgagcacaaggtgcacaacgtcgctacgaacccgccggccaagtccaaggtcctgccggtccacgagctggtcaggtcactcggttgcccctccactgcccaacccacatgttctgacttctga

SEQ ID NO: 313 - protein, 237 aa, Zea mays
MSQLLHLPDLAAPRTRMGSALAAGARVKQGEAGTARGRVLRVADPVRRECLVPVPPPPVLAAGRRGDDDDVDEERQRYYLNLGYAIRTLREELPDVLCKDHSFDIYREDIVFRDPLNTFKGLGNYKRLFWALRLTGRVFFRASWVEVVSIWQPAENSILLRWTAHGVPRVPWGWWDAAHARFDGASVYKLDRNGKIYEHKVHNVATNPPAKSKVLPVHELVRSLGCPSTAQPTCSDF

SEQ ID NO: 314 - DNA, 894 bp, Zea mays
atggctgctactatagatctgtcaggggaggagctgatgagagcactcgagccttttatccgggatgcctctgctcacggatccagtccgctcctccacccgcaccagccacttagcccctcgtcgccgttctccttccaccaagccgtcgccgccgcctcctcctacggagggaactacccgttcgccgcggccgacgaggcgggccagctgagcccttcccagatgcagtacatccaggcccgcctccacctgcagcgtcgccaggcgcagacctccgtgctgggcccgcgtgcccagcccatgaaggcgtcggcgtccgcggcccccgccccggcgcggccgcagaagctgtaccgcggcgtgcggcagcggcactggggcaagtgggtggcggagatccggctcccgcgcaaccgcacccggctctggctcggcaccttcgacaccgccgaggaggcggcgctggcctacgaccaggccgcctaccgcctccgcggcgacgcggcgcgcctcaacttccccgacaacgccgcctcccgcggcccgctccacgcctccgtcgacgccaagctccagagcctgtgccagagcatcgccgcgtccaagaagggcgccaagaagccggcctccgccgcagctgccgcgtcgtcgtccgcccccaccagcaactgctgctcctcgccgtcgtccgacgacgcgacctcgtcctgcctcgagtccgccaccgagtcctcgtgcccgtccccgtcgccgtccgcctcgccagggccgacggtgccggagatgcagcagctggacttcagcgaggcgccgtgggacgaggccgccggcttcgcgctcaccaagtacccgtcgtacgagatcgactgggactccctcctcgccaattaa

SEQ ID NO: 315 - protein, 297 aa, Zea mays
MAATIDLSGEELMRALEPFIRDASAHGSSPLLHPHQPLSPSSPFSFHQAVAAASSYGGNYPFAAADEAGQLSPSQMQYIQARLHLQRRQAQTSVLGPRAQPMKASASAAPAPARPQKLYRGVRQRHWGKWVAEIRLPRNRTRLWLGTFDTAEEAALAYDQAAYRLRGDAARLNFPDNAASRGPLHASVDAKLQSLCQSIAASKKGAKKPASAAAAASSSAPTSNCCSSPSSDDATSSCLESATESSCPSPSPSASPGPTVPEMQQLDFSEAPWDEAAGFALTKYPSYEIDWDSLLAN

SEQ ID NO: 316 - DNA, 2616 bp, Zea mays
atgttcggaaacatcggaaagatcccgatcatcggcgacctgacgggcagcaacaagaatgcgcacctcaagggcaacctggtgctcatgcgcaagaccgtgctcggcttcgacgtcaccagcatcgccggctccctcatggacggcctcggcgagttcctcggccgcggcgtcacctgccaactcgtcagctccaccgtcgtcgaccccaacaacgggaaccgcgggaaggtgggtcaggaggcgagcctggagcagtggctgctgcacccgccgccgcttctggccggcgaggaccagttccgcgtcaccttcgactgggaggtggagaagcacggcgtcccgggcgccatcatcgtgaagaacaaccacgcctccgagttcttcctcaagaccatcaccatcgacgacgtccccggccacggccccatcgtcttcgtcgccaactcatgggtgtacccgcagtacaagtaccgctacaaccgcgtcttcttctccaacgacacgtacctccccagccagatgccggcggcgctgaagccttaccgcgacgacgagctccgcaacctgaggggcgacgaccagcagggcccgtaccaggagcacgaccgcgtctaccgctacgacgtctacaacgacctcggcaaccccgacgccaaaaacccgcgccccgtcctcggcggctccaagcaccacccctacccgcgccggcggcccacgggccggaagccgacgcagacagaccccaacagcgagagcaggctgacgctgaccgacggcgacgtctacgtgccgcgcgacgagcgcttcggccacatcaagaactccgacttctacggctacaccatcaaggcgttcgtcgacggcctggtgcccatcctggaaggctacctcctcggcatcgagttcaactccttcaaggacatcctgcagctgtacgagggcggtatcaagctgcccgacatccccgccctcgaggagttccgcaagcagttcccgctacagatggtcaaggacctcatgcccgccggcggcgactacgtcctcaagctccccatgcccaaaatcatcaaagaggacaagaaagcttggatgagtgacgaggagttcgcaagggagaccctcgccggcgtgaaccccttgatcatcaggcgtctcacggagttccctccgaaaagcacccttgatccgagcaagtacggcgaccagacgagcaccatcacggaggcgcacatcgcggggagcctggagggcctcaccgtgcagcaggcgctggacagcaaccggctctacatcctggaccaccacgaccactacatgccgttcctgatcgaggtcaacagcctgaacgacaacttcatctacgccaccaggacgctcctgttcctgcgcggcgacggcacgctcgcgccggtggccatcgagatgagcctccccgagctccgggacggcatcacggccgcgaagagcacggtgtacacgccggcgccgccgacggccggcgcggaggcgtgggtgtggcgcctggccaaggcctacgtgaacgtgaacgactactgctggcaccagggcatcagccactggctcaacacgcacgcggtgatggagccgttcgtgatcgccaccaaccggcagctcagcgtgacgcaccccgtgcacaggctgctgctgccgcactaccgcgacaccatgaacatcaacgccctcgcgcgccagaagctcatcaacgccggcggcatcttcgagatgaccgtcttcccgcgcaagtacgccatcgagatctcctccaaagtctacggcagctggaacttcaccgagcaggccctccccgacgacctcatcaagcgaggcatggccgttccagatccgtcgagcccctacaaggtgcggctgctgatcgaggactacccgtacgcctcggacgggctggccgtgtggcacgccatcgagcagtgggtgacggagtacctggccatctactaccccaacgacggcgtgctgcaggccgacgtggagctgcaggcgtggtggaaggaggcgcgcgaggtcgggcacgccgacctcaaggacgagcactggtggcccaagatgcagacggtgccggagctcgtgaaggcctgcaccaccatcatctggatcgcgtcggcgctacacgctgccgtcaacttcgggcagtacccgtactgcgggtaccacccgaaccggccgtccgtgagccggcggcccatgccggtgccgggctccgacgcgtacaaggagctggagaagaacccggagaagttcttcgtgcgctccatcaccgcccagttccaggccgtcgtcggcatctcgctgctggagatcctgtccagccactcctccgacgaggtgtacctcggccagcgcgacaccaaggagtggacgtcggacgccaaggcgcaggaggcgttcaagcggttcggcgcgcggctgaccgagatcgagaaacgcgtggaggccatgaacaaggacccgcgcttcaagaaccgctacagcgcggcccagttcccctacaccctgctcttccccaacacctccgacaagggcgataacaccggcgtcaccgccaagggcatccccaacagcatttccatctga

SEQ ID NO: 317 - protein, 871 aa, Zea mays
MFGNIGKIPIIGDLTGSNKNAHLKGNLVLMRKTVLGFDVTSIAGSLMDGLGEFLGRGVTCQLVSSTVVDPNNGNRGKVGQEASLEQWLLHPPPLLAGEDQFRVTFDWEVEKHGVPGAIIVKNNHASEFFLKTITIDDVPGHGPIVFVANSWVYPQYKYRYNRVFFSNDTYLPSQMPAALKPYRDDELRNLRGDDQQGPYQEHDRVYRYDVYNDLGNPDAKNPRPVLGGSKHHPYPRRRPTGRKPTQTDPNSESRLTLTDGDVYVPRDERFGHIKNSDFYGYTIKAFVDGLVPILEGYLLGIEFNSFKDILQLYEGGIKLPDIPALEEFRKQFPLQMVKDLMPAGGDYVLKLPMPKIIKEDKKAWMSDEEFARETLAGVNPLIIRRLTEFPPKSTLDPSKYGDQTSTITEAHIAGSLEGLTVQQALDSNRLYILDHHDHYMPFLIEVNSLNDNFIYATRTLLFLRGDGTLAPVAIEMSLPELRDGITAAKSTVYTPAPPTAGAEAWVWRLAKAYVNVNDYCWHQGISHWLNTHAVMEPFVIATNRQLSVTHPVHRLLLPHYRDTMNINALARQKLINAGGIFEMTVFPRKYAIEISSKVYGSWNFTEQALPDDLIKRGMAVPDPSSPYKVRLLIEDYPYASDGLAVWHAIEQWVTEYLAIYYPNDGVLQADVELQAWWKEAREVGHADLKDEHWWPKMQTVPELVKACTTIIWIASALHAAVNFGQYPYCGYHPNRPSVSRRPMPVPGSDAYKELEKNPEKFFVRSITAQFQAVVGISLLEILSSHSSDEVYLGQRDTKEWTSDAKAQEAFKRFGARLTEIEKRVEAMNKDPRFKNRYSAAQFPYTLLFPNTSDKGDNTGVTAKGIPNSISI

SEQ ID NO: 318 - DNA, 1269 bp, Zea mays
atggctgcaacgagtatgatcagggcgccgattgggccgaacccgaggctcgcgtgctacgccccggcgaggggcggcggcgtggtcaggtgctcgttgcagggcgcggtcgtcggcggccgggcggagtggcagagcagctgcgccatgctgtccagcaaggtggctgcgctcgggacgcactccatcaacggccacgtcgcgccggcgccggcgccggcgccagcggtgctggatttggtccccgtgagtagtatgaatggcgccgtggctaagaacctgccgcagccgcttcgcatcgcggacctgtcccctgcgccgatgcacgggtcggagctacgcgtggcttaccagggcgtgcccggcgcgtacagcgagaaggcggccgggaaggcgtacccgggctgcgacgccatcccctgcgaccagttcgaggtggcgttccaggccgtggagctgtggattgccgaccgcgccgtgctccccgtggagaactcgctgggcggcagcatccaccgcaactacgacctgcgagttctccggcaccggctccacatcgtcggggaggtgcagctccccgtgcaccactggctgctggcgctgcccggggtgcgcaaggagtgcctgacccgcgtgatgagccacccgcaggcgctggcgcagtgcgagcacacgctcacggccatgggcctcaacgtcgtccgcgaggccttcgacgacacggccggcgccgccgagtacgtggccgccaacggcctccgcgacacggccgccatcgcgtcctcccgcgccgccgagctgtacgggatggaggtgctggcggacggcatccaggacgactccggcaacgtcacccgcttcgtgatgctggcccgggagcccgtcgtgccgcgcaccgaccgccccttcaagaccagcatcgtgttcgcgcacgacagggagggcacctccgtgctcttcaaggtgctctccgccttcgccttccgcgacatctcgctcaccaagatcgagagcaggccgcaccgccaccgccccatccgcctcgtcgacgacgccaacgtcggcaccgccaagcacttcgagtacatgttctacgtcgacttccaggcgtccctcgcagagccccgcgcgcagaacgcgctggccgaggtccaggagtacacgtccttcctccgggtgctcgggagctaccccatggacatgacccccatgaccgccggctcctcctccaccgttgtttcctcgtccgatgatccctcgtcgtcttga

SEQ ID NO: 319 - protein, 422 aa, Zea mays
MAATSMIRAPIGPNPRLACYAPARGGGVVRCSLQGAVVGGRAEWQSSCAMLSSKVAALGTHSINGHVAPAPAPAPAVLDLVPVSSMNGAVAKNLPQPLRIADLSPAPMHGSELRVAYQGVPGAYSEKAAGKAYPGCDAIPCDQFEVAFQAVELWIADRAVLPVENSLGGSIHRNYDLRVLRHRLHIVGEVQLPVHHWLLALPGVRKECLTRVMSHPQALAQCEHTLTAMGLNVVREAFDDTAGAAEYVAANGLRDTAAIASSRAAELYGMEVLADGIQDDSGNVTRFVMLAREPVVPRTDRPFKTSIVFAHDREGTSVLFKVLSAFAFRDISLTKIESRPHRHRPIRLVDDANVGTAKHFEYMFYVDFQASLAEPRAQNALAEVQEYTSFLRVLGSYPMDMTPMTAGSSSTVVSSSDDPSSS

SEQ ID NO: 320 - DNA, 2388 bp, Zea mays
atgtcgtcgccgctggaggatgtcagcgtgggcatggaggaggaggatcagcggcccctgaaccgggccctgctccaccggagcgccaccaccaacgcctcccaggtggccatggtcggctccaatccctgccctatcgagagcctcgactacgagatgatagagaacgagctgttcgaccagaactggaggacgaggcgcaaggcggaccaggtgcggtacgtggtgctcaagtggaccttctgcttcgccatcggcatcctcaccgggatcgtcggcttcttcatcaacctcgccgtcgagaacgtcgcgggcttcaagcaccaggccgtttccgccctcatggactccgccaggtgtggctactggacggcgttctgggtgttcgccggctgcaacctggcgctcctgctgctggcgtcgtccatcacggcgttcttgtcgccggcggccggcgggtcgggaatcccggaggtcaaggcctacctcaacggcgtcgacgcgcccaacatcttctcgctgcggaccctcgctgtcaaggtagtggggaacatcgcggccgtatcatcgtcgctgcacgtcggcaaggcggggccgatggtccacaccggcgcgtgcatcgctgccatcttcgggcagggaggctcccgcaagtacggcctcacctgccgctggctgcgctacttcaaaaacgaccgcgaccggcgcgacctggtgaccatcggcgccggcgcgggggtggcggcggcgttccgcgcgcctgtcggcggcgtgctgttcgcgctcgagtcgctgtcctcgtggtggcgcagcgcgctcatctggcggtcgttctttacgacggcagtggtggcggtggtgctgcgcctcttcatcgagctgtgcgggaccgggcgctgcggcatgttcggccggggcggtctcatcatgtacgatgtcagcaccgtgttcgacgacctcatgacctaccacctcaaggacatccccaccgtcatcctcatcggcgtcaccggcgccctgctcggcggactctacaacttcctcatgataaaggttctccgactctacaacgccatcaacgagagaggtggagcgcacaagctgctgttagcggccaccgtctccatcgtgacgtcgtgctgcgtcttcggcctgccatggctggcgccgtgccggccgtgccccacgacgggtccactttcgtcgccggacgggacctgccacgcgctgaaccgtttccggcggttccactgcccaaagggccactacaacgatctcgccagcctgttcctcaacatcaacgacgacgcgatccgcaacctctactccaccggcaccaacgacgtgtaccacccggtttccatggtcatcttcttcgtggcgtcctacgcgctcggcgtgctcagttacggcgttgtggcgccgtccgggcttttcgtccccatcatcctcacgggcgccacctacggccgcctcgtggcaatgctgctcgggggccgctccggcctcgaccacggcctcgtcgccatcctcggctccgcgtcattcctcggcgggacgctccggatgacggtgtccgtgtgcgtcatcatcctcgagctcaccaacaacctgctactgctgccgctcgtcatgctcgtgctgctcatctccaagacggtcgccgactccttcaactccagcatctacgacctcatcctgcgcctcaagggcctgccccacctcgatggccacgctgagccgtacatgcggcagctggccgtcggcgacgtggtggccgggccgctgcggagcttcggcggcgtggagaaggtcggcaacgtcgtgcacacgctccgcaccacggggcaccacgcgttccccgtcgtggacgagccgcccttttcgccggcgccggtgctctacggcctggtgctgcgcgcgcacctgctggtgctgctcaagaagagggagttcctggtggcgccggagcggtgcccaaaggagtacgtggccgagaggttccaggcggaggacttcgacaagcgcgggtccgggaagcaggataccatcgccgacgtggtgctgtcgccggaggagatggagatgtacgtcgacctgcaccccttcaccaacacgtcgccgtacacggtggtcgagaccatgtcgctggccaaggcgctcgtgctcttccgggaggtcggcctgcgccacctcctcgtcgtgcccaaggcctgcgataggtcgccggtggtcggcatcttgacgaggcatgacttcatgccagagcacattctggagctgcaccctgtccttctgaggagcaggtggaagaggctccggtggcagaggggcgccatggccaagtacttccgatcgctcatcgtgtgggtcgccaacagcggctga

SEQ ID NO: 321 - protein, 795 aa, Zea mays
MSSPLEDVSVGMEEEDQRPLNRALLHRSATTNASQVAMVGSNPCPIESLDYEMIENELFDQNWRTRRKADQVRYVVLKWTFCFAIGILTGIVGFFINLAVENVAGFKHQAVSALMDSARCGYWTAFWVFAGCNLALLLLASSITAFLSPAAGGSGIPEVKAYLNGVDAPNIFSLRTLAVKVVGNIAAVSSSLHVGKAGPMVHTGACIAAIFGQGGSRKYGLTCRWLRYFKNDRDRRDLVTIGAGAGVAAAFRAPVGGVLFALESLSSWWRSALIWRSFFTTAVVAVVLRLFIELCGTGRCGMFGRGGLIMYDVSTVFDDLMTYHLKDIPTVILIGVTGALLGGLYNFLMIKVLRLYNAINERGGAHKLLLAATVSIVTSCCVFGLPWLAPCRPCPTTGPLSSPDGTCHALNRFRRFHCPKGHYNDLASLFLNINDDAIRNLYSTGTNDVYHPVSMVIFFVASYALGVLSYGVVAPSGLFVPIILTGATYGRLVAMLLGGRSGLDHGLVAILGSASFLGGTLRMTVSVCVIILELTNNLLLLPLVMLVLLISKTVADSFNSSIYDLILRLKGLPHLDGHAEPYMRQLAVGDVVAGPLRSFGGVEKVGNVVHTLRTTGHHAFPVVDEPPFSPAPVLYGLVLRAHLLVLLKKREFLVAPERCPKEYVAERFQAEDFDKRGSGKQDTIADVVLSPEEMEMYVDLHPFTNTSPYTVVETMSLAKALVLFREVGLRHLLVVPKACDRSPVVGILTRHDFMPEHILELHPVLLRSRWKRLRWQRGAMAKYFRSLIVWVANSG

SEQ ID NO: 322 - DNA, 828 bp, Zea mays
atgggtcggcagccgtgctgcgacaagttgggggtgaagcgggggccgtggacggcggaggaggaccgcaagctcatcaacttcatcctcaccaacggccattgctgctggcgcgcggtgcccaagctcgccggcctgctgcgctgcggcaagagctgccgcctgcgctggaccaactacctccgcccggacctcaagcgcgggctcctcacggacgccgaggagcaggtcgtcatcgacctccacgccaagctcggcaacagatggtcgaagattgctgccaagctaccgggcaggactgacaacgagatcaagaaccactggaacacgcacattaagaagaagctgatcaagatgggcatcgatccagtcacgcacgaacccctcgaccggaagacaaccagcagcggcccggctacaacctctcagtcaaccaagtctgacgaggcgaccaaggagcagagcccgcagaacgacgacgccgtgataagggacgtgccggccgatggttgcagcccgacggaatcgagcacgaacaccgtgagcaccggcggaagcagcagcagtggtggcggcggccatgaccaagacccgctggtgaagtggcttttggaagaggagcctgccaccggcgacgaggcgtggctgaacttcactggcagtgtcgacgtggacgagttcagcagcattgccgccggtccggagttgttgccgtgggatggcgcgaccgactggctgctcgactaccaagattttggattgggggactcgagcttggtcgatggctacatggtcaacaacaacagctcaaacggagcaaagttctag

SEQ ID NO: 323 - protein, 275 aa, Zea mays
MGRQPCCDKLGVKRGPWTAEEDRKLINFILTNGHCCWRAVPKLAGLLRCGKSCRLRWTNYLRPDLKRGLLTDAEEQVVIDLHAKLGNRWSKIAAKLPGRTDNEIKNHWNTHIKKKLIKMGIDPVTHEPLDRKTTSSGPATTSQSTKSDEATKEQSPQNDDAVIRDVPADGCSPTESSTNTVSTGGSSSSGGGGHDQDPLVKWLLEEEPATGDEAWLNFTGSVDVDEFSSIAAGPELLPWDGATDWLLDYQDFGLGDSSLVDGYMVNNNSSNGAKF

SEQ ID NO: 324 - DNA, 1542 bp, Zea mays
atggactcaacgacgacggcgccgctgctgcagccgtccgccgcctcgagcaaggaggggccggggccggcgccggctcagcacggtgagggcagccgggagctggaggcgatcctggccgacgcgtccaagccgtgggcttggcgggcctgggaaggcgcccgcctggagctgccgctgctgctgcgggtggcgctgccggcggtggccgtctacatgatcaacttcgtcatgtccatgtccacgcagatcttctgcggccagctcggcaacctcgagctcgccgcctcctcgctcggcaacaccggcatccagcccttggcctacggcctcatgctgggcatgggcagcgcggtggagacgctgtgcgggcaggcgtacggcgcgcacaagcaccgcatgctgggggtgtacctgcagcgctcgacggtgctgctcatggccaccgccgtgccgctgaccgtcgtctacgccttctcggagcgcatcctggtcctcctcggcgagtcggagcgcatctccagggccgccgccgtcttcgtctacgggctcatcccgcagatcttcgcgtacgcggccaacttccccatccagaagttcctgcaggcgcagagcatcgtggcgcccagcgcttacatctccgtggccacgctggcgctgcacctggggctcagctgggtcgccgtctacaggctgggcctgggcctgctggggggctcgctcgtgctcagcttcagctggtgggtcatcgtcgcggcccagttcgggtacatcgtcaccagcgcccggtgcagggacacctggacgggattcaccacgcaggccttctcgggcctcggcaccttcttcaagctctcggcagcgtccgccgtcatgctgtgcttggagacttggtacttccagatcatcgtgctcatcgccggcctgctcaagaacccggagctctccctcgactccctctccatatgcatgaacgtgaacgcatgggtgttcatgatctccgtcgggttcaacgccgcggcgagcgtgcgggtcgggaacgagctcggcgcaggcaacccgagggcggcggcgttctcggtgttcatggtgacgtcgctgtcgttcatcgcggcgacggtgtgtgccgtcgtcgtgctgtgcctccgcgaccagctgagctacttcttcactggcggcgaggccgtggcgcgcgccgtgtccgacctctgcccgctcctcgccgccacgctcgtcctcaacggcatacagccagtcctctccggcgtcgccgtgggctgcgggtggcaggcgtttgtggcgtacgtgaacgtgggttgctactacgtcgtcggcgtgccgctcggcgtcttcctcggcttctacctcgacctcggcgccaagggcgtttggagcggcatggtcatcgggggaaccttgacgcagacgctcatcctgctctgggtcaccgtcagaaccgactggaacaaggaggtggagaacgccaaggcgaggctggacaagtgggacgacaagaagcagcccctcctagtcgaagattga

SEQ ID NO: 325 - protein, 513 aa, Zea mays
MDSTTTAPLLQPSAASSKEGPGPAPAQHGEGSRELEAILADASKPWAWRAWEGARLELPLLLRVALPAVAVYMINFVMSMSTQIFCGQLGNLELAASSLGNTGIQPLAYGLMLGMGSAVETLCGQAYGAHKHRMLGVYLQRSTVLLMATAVPLTVVYAFSERILVLLGESERISRAAAVFVYGLIPQIFAYAANFPIQKFLQAQSIVAPSAYISVATLALHLGLSWVAVYRLGLGLLGGSLVLSFSWWVIVAAQFGYIVTSARCRDTWTGFTTQAFSGLGTFFKLSAASAVMLCLETWYFQIIVLIAGLLKNPELSLDSLSICMNVNAWVFMISVGFNAAASVRVGNELGAGNPRAAAFSVFMVTSLSFIAATVCAVVVLCLRDQLSYFFTGGEAVARAVSDLCPLLAATLVLNGIQPVLSGVAVGCGWQAFVAYVNVGCYYVVGVPLGVFLGFYLDLGAKGVWSGMVIGGTLTQTLILLWVTVRTDWNKEVENAKARLDKWDDKKQPLLVED

SEQ ID NO: 326 - DNA, 1584 bp, Zea mays
atgcctcccgtgaaggccgaggacctggttgtgcacgccgtcaaggagcagttcgccggcctcgactactgcatcaccagccccccgccatggatcacgacggtgctcgttggcttccagcactacctggtcatgctcggcaccaccgtcctcatcgccaccatcatcgtcccgctcatgggcggcggccatgccgagaaggcgatcgtgatccagaccatcctgttcctctccgggatcaacacgctgctgcaggtccacttcggcacgcggctccccgccgtgatgagcggctcctacacctacatctacccggccgtggccatcatcctgagcccgcgatacgcgctcctcatcgaccctctcgagagattcgtgttcacgatgaggtcgctccagggcgcgctcatcatcgccggcgtcttccaggccgtcgtcggcttcttcggcatatggagagtctttattaggttcctgagccccctcgcggcggtccccttcgtcacgctcacgggcctgggactcttcttcttcgcgttccccggggtcaccaagtgcatcgaagtgggtctccccgcccttgtcctcctggtgatcttcgcagagtacgcctcccacctgttcgctaaggggagcttcgtgttcagccggtgcgccgtgctggtgaccgtcgtgatcatctggatctacgccgagatcctgacggcggccggcgcctacaacgagaggggccctgtgacgcagttcagctgccgcgccgaccgctccgggatcatccagggctcaccttgggtgaggtttccttatccgttccagtggggataccccattttctgcttccaggattgcttcgccatgctggcggcttcttttgcgtcgcttattgagtctaccggcaccttaatcgcagtgtcaagatactcaggcgcgacgttctgcccaccctccgtcttctcacgtggaattggctgggagggtatatctatcatactggacgggatgtgcggtacactgacaggaacagcggcttcagttgagaatgcaggtctactggcagtgacgcgagttggaagccggcgagtcattaagatctcagccttgttcatgattttcttctccttgtttgccaaatttggggcggttcttgcatccattccattgcctattttcgctgcactgtactgcgtcctcttcgcttattcagctggtgcaggcttcagcttactccagtactgcaacctcaactccttgaggacaaagttcatactcagcatctcgttgttcctggggctgtccatcccacagtacttccgggtctacgagatgttcttcggcttcggaccagttcacacccattcagtagcgttcaacgtgatggtcaatgtcatcttctcatcgccggcgacggtggccgccatactggcctaccttctggactgcacccacctgtactgggaggctagtgtgaagaaggacaggggctggttctggtgggagaagttcaagtcctacaagtatgatggcaggagcgaggagttctaccgtcttccttatggcttgagcaggtacttcccctcgctctag

SEQ ID NO: 327 - protein, 527 aa, Zea mays
MPPVKAEDLVVHAVKEQFAGLDYCITSPPPWITTVLVGFQHYLVMLGTTVLIATIIVPLMGGGHAEKAIVIQTILFLSGINTLLQVHFGTRLPAVMSGSYTYIYPAVAIILSPRYALLIDPLERFVFTMRSLQGALIIAGVFQAVVGFFGIWRVFIRFLSPLAAVPFVTLTGLGLFFFAFPGVTKCIEVGLPALVLLVIFAEYASHLFAKGSFVFSRCAVLVTVVIIWIYAEILTAAGAYNERGPVTQFSCRADRSGIIQGSPWVRFPYPFQWGYPIFCFQDCFAMLAASFASLIESTGTLIAVSRYSGATFCPPSVFSRGIGWEGISIILDGMCGTLTGTAASVENAGLLAVTRVGSRRVIKISALFMIFFSLFAKFGAVLASIPLPIFAALYCVLFAYSAGAGFSLLQYCNLNSLRTKFILSISLFLGLSIPQYFRVYEMFFGFGPVHTHSVAFNVMVNVIFSSPATVAAILAYLLDCTHLYWEASVKKDRGWFWWEKFKSYKYDGRSEEFYRLPYGLSRYFPSL

SEQ ID NO: 328 - DNA, 1857 bp, Zea mays
atgagcaggaggttctctgcagctagcaggtcaagctcaggacggtcaatgggtgacgcagaaaatgataatattgccgagaagccaaagcctcccatcccatcattcaggaggttactgatgcttaatgcaccagaatggaagcaggctctgatgggaagtttcagtgcaattgtgtttggaggcatacaacctgcatatgcatatgccatgggcagcatgatctcaatctacttcttggcagaccatgatgagatcaaggacaaaacaaggacctacgcactcatctttgttgctcttgcagtgctctcattcttgatcaatattgggcaacattacaacttcggtgccatgggggaatacctcacaaagagagtgagagaacagatgcttgcaaaaatcctcacttttgagattgggtggtttgaccgtgatgagaactccagtggtgccatatgctcacaacttgccaaggatgccaacgtggtgaggtctcttgcgggggagcgaatggctctagtgatccagacagtttctgcagttcacatagcctgcactatgggtctggtgatcgcttggcgtttggcccttgtcatgatagcagtgcaaccccttatcattgtttgcttttatgctcgccgtgtcttactgaagagcatgtccaagaaatcaatacaggcacaatctgaaagtagcaagctagcagctgaggctgtctccaatctccgcaccatcactgctttctcatctcaggaccgtatcctacgcctctttgaccaagcacaagatgggccacgcaaggaaagcatccgacagtcatggtttgcaggactgggccttggcacctccatgagcctcatgacatgcacatgggccctagatttctggtatggtggcaagctcatggctgagcgtcacataactgcaaaggcactcttccagaccttcatgatactagtaagcacagggcgtgtgattgcagatgcaggtagcatgacaacagaccttgctaagggtgctgatgcagtagcttcagtattcgctgttcttgacagggaaaccgaaattgaccctgataaccctgaggggtacaaaccagagaagctaaaaggtgaggttgacatcaaaggagttgactttgcatacccatcaaggccagatgtgattatattcaaaggtttctccttgagcatccaaccaggcaagtcaacagcccttgttgggcaaagtggttctggtaagtcgactatcataggtcttatagagaggttctacgacccacttaggggggtagtgaagatcgatggcaaagacatcaaaacatacaatctcagagccctgcgtcgacatattggattagtcagccaagaaccaacactatttgcaggtacaataagagaaaatattgtgtatggtacagaaacagcaaccgaagcagaaattgagaatgctgcaaggtctgcgaatgcacatgacttcattagcaacctcaaggatggatatgacacatggtgtggtgagaggggtgtgcagctctcaggaggccaaaaacaacgcattgcaattgcccgtgccatcctgaagaaccctgcaatcctgctactggatgaagctacaagtgcactggacagccagtcagagaaggtggtacaagaggcattggaccgagtgatggttggcaggacaagcattgtggtggcacacaggctcagcacaatccagaactgtgaccagatcactgtgcttgaaaaaggaattgttgtggagaagggcacacatgcatcccttatggctaagggtccctctggaacatactttggattggtcagtttgcaacaaggaggcaaccagcactga

SEQ ID NO: 329 - protein, 618 aa, Zea mays
MSRRFSAASRSSSGRSMGDAENDNIAEKPKPPIPSFRRLLMLNAPEWKQALMGSFSAIVFGGIQPAYAYAMGSMISIYFLADHDEIKDKTRTYALIFVALAVLSFLINIGQHYNFGAMGEYLTKRVREQMLAKILTFEIGWFDRDENSSGAICSQLAKDANVVRSLAGERMALVIQTVSAVHIACTMGLVIAWRLALVMIAVQPLIIVCFYARRVLLKSMSKKSIQAQSESSKLAAEAVSNLRTITAFSSQDRILRLFDQAQDGPRKESIRQSWFAGLGLGTSMSLMTCTWALDFWYGGKLMAERHITAKALFQTFMILVSTGRVIADAGSMTTDLAKGADAVASVFAVLDRETEIDPDNPEGYKPEKLKGEVDIKGVDFAYPSRPDVIIFKGFSLSIQPGKSTALVGQSGSGKSTIIGLIERFYDPLRGVVKIDGKDIKTYNLRALRRHIGLVSQEPTLFAGTIRENIVYGTETATEAEIENAARSANAHDFISNLKDGYDTWCGERGVQLSGGQKQRIAIARAILKNPAILLLDEATSALDSQSEKVVQEALDRVMVGRTSIVVAHRLSTIQNCDQITVLEKGIVVEKGTHASLMAKGPSGTYFGLVSLQQGGNQH

SEQ ID NO: 330 - DNA, 522 bp, Zea mays
atgcacagcggagcgaggaagctcatgtgggggaccagcccggacaggcccgacgaccacgacgtggtcatcgtgctcgcctcgctgctgtgcgcgctcatcaccgtcctcggcatcggcctcgtggcgcggtgcgcgtgcgcgcgcgggcccagcgcgcaggcggcggctgccgccaacaggggcgtcaagaagtcggtgctgcgcaggatccccaccgtgccctacgccgcctgcagccaaggggaaggggacgacgcggacgagtgcgccatctgcctggcggagttcgaggagggcgagcccacgcgcgtgctgccccagtgcggccacgccttccacgccgcctgcgtcgacaggtggctgcgcgcccactcgtcctgcccctcctgccgccgcatcctctccctccagctgccgcccggcgagcggtgccgccgctgcggcgcgcggcccctggacgacggggacgctgggtggaagcccacctactacagcgccatgccgccgttcctggcgtaa

SEQ ID NO: 331 - protein, 173 aa, Zea mays
MHSGARKLMWGTSPDRPDDHDVVIVLASLLCALITVLGIGLVARCACARGPSAQAAAAANRGVKKSVLRRIPTVPYAACSQGEGDDADECAICLAEFEEGEPTRVLPQCGHAFHAACVDRWLRAHSSCPSCRRILSLQLPPGERCRRCGARPLDDGDAGWKPTYYSAMPPFLA

SEQ ID NO: 332 - DNA, 1089 bp, Zea mays
atgcgcgcgccggcgggcggtgccagtgccaccgcgctcgcggcggccatgaacattaagcagccgctgcacggcgcatcgacgctgttcgcgctgctctccctctcgctgctcctcctccgcctgctcctccggctccgcctggccgccttccgcgacgcggcgctgtcgctccacctgctggcgcgcctccgcctccgccccgtcctcctctgcctcccgtcagcctgccacgacggcggcgccggcgccggcgccaccacgctgcgcgtctggtgccccgccgccccatcctccaagccgccgctgctcctcctccacggcttcggcggggacgccaagtggacgtgggcgcgcaacctcccgcgcctgtcccgccacttccacgtgtacgtgccggacctcgtgttcttcggcgcgcagtcccggtccgcgtcgccgctgcgctccgtggcgttccaggcccgctgcgccgccgaggccatgcgcctcctcggcgtgccccgctacgacgtcgcggggatcagctacggcggcttcgtcgcctaccggatggccgccatgttcccggatttcctccaccgggtcgccctggtctgcgccggggtctgcctcgaggagagagacctggcggagggcctcttccccgtggccgggatcggggaggccgccgcgctgctcgtgccgcaccgcccggaggaggtgcgccgcctagtccgcctcaccttcgcgcgcccgcccctcatcatgccctcctgcttcctatgggactacatcaaggtgatgggctccgatcatatccaggagaaggctgagctgctatacgctttgattaacgggagacaactctgtactcttccaaaattgacccagccgacgcttataatctggggagagcaagatcgggtgttcccaatggagctggctcacagattgaaccggcatctagaggggaattctcgattagttgtcataaaaaatgctgggcacgcggtcaatatcgagaagcccaaggaagtgtgccggagcatcattgagttcttcaaggagcctgtcgctggagctgcaaatgcggacgacaaggtgtag

SEQ ID NO: 333 - protein, 362 aa, Zea mays
MRAPAGGASATALAAAMNIKQPLHGASTLFALLSLSLLLLRLLLRLRLAAFRDAALSLHLLARLRLRPVLLCLPSACHDGGAGAGATTLRVWCPAAPSSKPPLLLLHGFGGDAKWTWARNLPRLSRHFHVYVPDLVFFGAQSRSASPLRSVAFQARCAAEAMRLLGVPRYDVAGISYGGFVAYRMAAMFPDFLHRVALVCAGVCLEERDLAEGLFPVAGIGEAAALLVPHRPEEVRRLVRLTFARPPLIMPSCFLWDYIKVMGSDHIQEKAELLYALINGRQLCTLPKLTQPTLIIWGEQDRVFPMELAHRLNRHLEGNSRLVVIKNAGHAVNIEKPKEVCRSIIEFFKEPVAGAANADDKV

SEQ ID NO: 334 - DNA, 1983 bp, Zea mays
atggtgggcatgagaggcgcctacggtggtgcttgcaatgacgacagcaagagccggctgcacggaggcaaggcggcggagccggagatcgcgtcgatggcagtgcacaaggtggcgccgccaccggcgcggagcacggcgagcaagatgaaggtgagggtgaaggagaccttcttccccgacgacccgttccgggcgttcaaggggcagccgccggggacgcagtggctcatggcggtcaggtacctcttccccatcctggactgggtgccgagctactccttgtcgctcttcaagtccgacctcgtcgcgggcctcaccattgccagcctcgccattcctcagggcattagctacgcgaagctggcaagcttgcctcccataatcgggctgtattcgagcttcgtgccgccgatggtgtacgcggtgctggggagctcccgtgacctggcggtgggcccggtgtcgatctcgtcgctgatcatggggtccatgctgcggcaggccgtgagccccaccgcggagccgacgctgttcctgcagctggccttcacctccaccctgttcgcggggctggtgcaggcctccctgggcatcctcaggctcggcttcgtcatcgacttcctgtccaaggcgacgctggtggggttcatggccggcgccgccatcatcgtggcgctgcagcagctcaaggcgctgctgggcatcgtccacttcaccaccgagatgggcatcgtcccagtcatggcctccgtcttccaccacaccagcgagtggtcgtggcagacgatcctcatgggcgtctgcttcctcgtcttcctgctgtcggcgaggcatgtgagcatcagatggccaaagcttttctgggtttcggcgtgcgcgcccctggcatcggtcaccatctcgacgctgcttgttttcctcttcaaagctcagaaccatggcatcagcatcattgggcagctcaagtgcggcctgaatcgcccctcgtgggacaagctcctgtttgacacggcgtatttaggcctcaccatgaagactggccttgtcaccggaatcatctcactgacggaaggaatagcggttggtagaacatttgcctcactcaaggactaccagatagatggaaacaaggagatgatggccatagggttgatgaatgttgttgggtcctgcacatcatgctacgtaacaacaggtgcgttctcccgctctgctgtaaaccacaacgccggctgcaagactgccatgtccaacgtgatcatggcgctgactgtgatggtcacgctgctgttcctcatgccactgttcgtgtacacacccaacgttgtcctcggagcgatcatcatcgccgcggtgatcggcctgatcgatttccccgcggtgtaccacatctggaagatggacaagatggattttctggtgtgcgtttgcgcgtttgccggcgtcatcttcatctcagtccaagaaggccttgcgatagcggttggtatatctatatttagggtgttgatgcagatcacaaggccgaagatgatggttcaagggaacatcaaggggactgatatttacagagacctgcatcactacaaggaggcccaaagagtttctgggttcttgatcttggccattgaagcaccgataaacttcgccaactccaactacctgaatgaaaggattaaaagatggatagaggaagaatcttttgaacaggataaacatactgaactccatttcataatcttggatctgtcagctgttcctgcaattgacacaagtggcatagcgttcctcattgacataaagaaatcaatagagaaacgtggtctggagcttgtgcttgtcaatccaactggagaagtcatggagaaaatacaacgtgcaaacgaggctgaaaactattttaggccagattgcttgtatctgaccactggcgaagcaatcgcttcactttctgcacttgccaagatgacaaaaccctaa

SEQ ID NO: 335 - protein, 660 aa, Zea mays
MVGMRGAYGGACNDDSKSRLHGGKAAEPEIASMAVHKVAPPPARSTASKMKVRVKETFFPDDPFRAFKGQPPGTQWLMAVRYLFPILDWVPSYSLSLFKSDLVAGLTIASLAIPQGISYAKLASLPPIIGLYSSFVPPMVYAVLGSSRDLAVGPVSISSLIMGSMLRQAVSPTAEPTLFLQLAFTSTLFAGLVQASLGILRLGFVIDFLSKATLVGFMAGAAIIVALQQLKALLGIVHFTTEMGIVPVMASVFHHTSEWSWQTILMGVCFLVFLLSARHVSIRWPKLFWVSACAPLASVTISTLLVFLFKAQNHGISIIGQLKCGLNRPSWDKLLFDTAYLGLTMKTGLVTGIISLTEGIAVGRTFASLKDYQIDGNKEMMAIGLMNVVGSCTSCYVTTGAFSRSAVNHNAGCKTAMSNVIMALTVMVTLLFLMPLFVYTPNVVLGAIIIAAVIGLIDFPAVYHIWKMDKMDFLVCVCAFAGVIFISVQEGLAIAVGISIFRVLMQITRPKMMVQGNIKGTDIYRDLHHYKEAQRVSGFLILAIEAPINFANSNYLNERIKRWIEEESFEQDKHTELHFIILDLSAVPAIDTSGIAFLIDIKKSIEKRGLELVLVNPTGEVMEKIQRANEAENYFRPDCLYLTTGEAIASLSALAKMTKP

SEQ ID NO: 336 - DNA, 936 bp, Zea mays
atggcggcatcggtggcgctgagcagcgggcaccggatgccggcggtggggctgggcgtgtggcggatggagaaggcggacatccgcggcctcatccacacagcgctccgcgtcggctaccgccacctggactgcgccgctgactaccagaacgaagctgaagttggtgacgcgctcgcagaggcattccagaccggactcgtcaagcgggaggacctgttcatcacaaccaagctgtggaactcagaccatgggcatgtgcttgaagcctgcaaggacagcctgaagaagctgcagctagactatctcgacctctacctcatccatttcccagtagccactcggcacaccggagtcggcacgacttctagcgctctgggtgacgatggcgtgctggacatcgacaccactatctccctggaaacgacatggcacgcgatggaagagcttgtttccatggggctggtgcgcagcattggaatcagcaactacgacatcttcctcaccagagactgcctggcctacgccaagataaagccggcggtgaaccagatcgagacgcacccctacttccagcgcgactcacttgtcaagttctgccagaagcacgggatctgcgtgaccgcgcacaccccgctgggtggctccaccgccaacgccgagtggttcgggacggtctcgtgcctggacgaccctgtcatcaagagcttggctgataagtacggcaagacgccggcgcagctcgtcctccgctggggtctgcagcgggacacggtggtgatccccaagacctccaaggtggagaggctgcaggagaactttgacgtcttcggtttcgacatctccggcgaggacatggagaggatgaaggccatcgaccggaagtaccggactaaccagcctgccaagttctggggcatcgacctctatgcttag

SEQ ID NO: 337 - protein, 311 aa, Zea mays
MAASVALSSGHRMPAVGLGVWRMEKADIRGLIHTALRVGYRHLDCAADYQNEAEVGDALAEAFQTGLVKREDLFITTKLWNSDHGHVLEACKDSLKKLQLDYLDLYLIHFPVATRHTGVGTTSSALGDDGVLDIDTTISLETTWHAMEELVSMGLVRSIGISNYDIFLTRDCLAYAKIKPAVNQIETHPYFQRDSLVKFCQKHGICVTAHTPLGGSTANAEWFGTVSCLDDPVIKSLADKYGKTPAQLVLRWGLQRDTVVIPKTSKVERLQENFDVFGFDISGEDMERMKAIDRKYRTNQPAKFWGIDLYA

SEQ ID NO: 338 - DNA, 375 bp, Zea mays
atggtgaggtccgccaccgtcctgtcgatggcgttcgtctcccgttccgggcggcctggccctggtgttgagatcctaccgccggttgcagttgcagttgcagaggaaggcggcggcgttccgttcgcagcgccgcacttggcactcgaactctcggccagcctgaagaaggcgtcccggaagcatacccgcgtccgcttggtcagctggaacacgacgtcctcgagctcccggagcaccagcgcttggaagaggaagcccccttcatccgcgacggatgacctgctccttttcgtcgcagcaaagctcgccccatcctggcaccaacggaacgaacacccagggctcggctcatcagagcagtgccgtgcgtga

SEQ ID NO: 339 - protein, 124 aa, Zea mays
MVRSATVLSMAFVSRSGRPGPGVEILPPVAVAVAEEGGGVPFAAPHLALELSASLKKASRKHTRVRLVSWNTTSSSSRSTSAWKRKPPSSATDDLLLFVAAKLAPSWHQRNEHPGLGSSEQCRA

SEQ ID NO: 340 - DNA, 585 bp, Zea mays
atgtccggagttcaggcgatgccggcggccgtgggcgtggcggggctgagagggtcagggttggttagcagcagcagtaccggcttgttcgccggcgactgcaagaggaaggctcgtcgcccggcgtgctcggcctgggccctcaggcagagccggatcggcagcaggagcaggagcaagaggggcctcggcatcgtctgcaacctcgcgggacagtacgaggattccttcgacgacgtccagcggcaactgatgaactacttcacctacaaggccgtgaggaccgtgctgacccagctctacgagctgaacccgccgagctaccgctggttctacaacttcgtcgctgtcaacaagcctaccgacggcaagcatttcctccgtgctctcggcaaggagaggcaggagctcgcagagcgagtgatggtcaccaggcttcacctgtacgggaaatggataaagaaatgcgaccatgccaagacgtacgagaagatctccgacgagaacctggcgctgatgcgggagcggctgatggagacggtcatctggccaaccgacgacagcagcacggagaagatcggctga

SEQ ID NO: 341 - protein, 194 aa, Zea mays
MSGVQAMPAAVGVAGLRGSGLVSSSSTGLFAGDCKRKARRPACSAWALRQSRIGSRSRSKRGLGIVCNLAGQYEDSFDDVQRQLMNYFTYKAVRTVLTQLYELNPPSYRWFYNFVAVNKPTDGKHFLRALGKERQELAERVMVTRLHLYGKWIKKCDHAKTYEKISDENLALMRERLMETVIWPTDDSSTEKIG

SEQ ID NO: 342 - DNA, 579 bp, Zea mays
atgaacggccgcggcaccggcggaggagggggaggggaggatgagatggaggaggacagcggccccagctgcgcgcagggggagggcgcggggaataaggagcgggtggtgctgatgtgggggtacttgcccggcgtgtccccgcagcgctcgccgctgctcgggccggtccccgtaaggttgcccccgacggcggcgactgccgccggtgatgggtggagagacgtgtgcggcggcggttgcggcttcgcgatggccatctctgagtctggaaaactcctcacttggggttcagctgatgacatgggccaaagttatgtgactgctgggaagcacgaggagactccagaagcttttccacttcctagcagtgtcgtgatagtgcgcgctgatgctggatgggctcactgtgttgcaataactgatgaatatgatgtttatacatggggttggaaagaatgtgttccaactggaagggttattggagaccagtcttcagttggaaccatggaaaaggatgaaaggcaaatggcaatggccactgaccaagatataataaaggcaactccattacagtga

SEQ ID NO: 343 - protein, 192 aa, Zea mays
MNGRGTGGGGGGEDEMEEDSGPSCAQGEGAGNKERVVLMWGYLPGVSPQRSPLLGPVPVRLPPTAATAAGDGWRDVCGGGCGFAMAISESGKLLTWGSADDMGQSYVTAGKHEETPEAFPLPSSVVIVRADAGWAHCVAITDEYDVYTWGWKECVPTGRVIGDQSSVGTMEKDERQMAMATDQDIIKATPLQ

SEQ ID NO: 344 - DNA, 867 bp, Zea mays
atgggcaaggaggtggatgtgtccactctagaggccggcggcgtccgtgaccgtgactacgcggaccctccgccggcaccgctgatcgacatcgacgagctcggcaagtggtccctgtaccgcgccgtgatcgccgagttcgtggccacgctgctgttcctgtacatcacggttgccacggtgatcgggtacaagcaccagacggacgcgtcggcgtcggggcccgacgcggcgtgcagcggcgtgggcatcctgggcatcgcgtgggcgttcggcggcatgatcttcatcctcgtctactgcaccgccggcatctcgggcggccacatcaacccggccgtcacgttcggcctcttcctggcgcgcaaggtctccctggtgcgcgctctgctgtacatggccgcgcagagcctcggtgctatctgcggcgtcgcgctcgtcaagggcttccagagcgggttctacgcgcgctacggcggcggcgccaatgaggtcagcgccgggtactccaccggcacggggctcgccgccgagatcatcggtaccttcgtgctcgtctacaccgtcttctccgccaccgaccccaagcgcaacgctcgcgactcccacgttccggtgctggcgccgcttccgatcgggttcgctgtgttcatggtgcacctggcgacgatcccgatcactggcaccggtatcaacccggcgaggagcctcggcgccgccgtcgtgtacaacaacagcaaagcctggagcgaccagtggatcttctgggtgggcccgttcatcggagcggcgatcgcagcgctataccaccagatcgtcctccgcgccagcgccagggggtacggctccttccggagcaacgcctag

SEQ ID NO: 345 - protein, 288 aa, Zea mays
MGKEVDVSTLEAGGVRDRDYADPPPAPLIDIDELGKWSLYRAVIAEFVATLLFLYITVATVIGYKHQTDASASGPDAACSGVGILGIAWAFGGMIFILVYCTAGISGGHINPAVTFGLFLARKVSLVRALLYMAAQSLGAICGVALVKGFQSGFYARYGGGANEVSAGYSTGTGLAAEIIGTFVLVYTVFSATDPKRNARDSHVPVLAPLPIGFAVFMVHLATIPITGTGINPARSLGAAVVYNNSKAWSDQWIFWVGPFIGAAIAALYHQIVLRASARGYGSFRSNA

SEQ ID NO: 346 - DNA, 861 bp, Zea mays
atgggcggcgccgcggaggaggcgttgcggcgggagtacgtggtcggcgaggagatcgggcgcggccggttcgggacggtccgccgctgctacgccgccgccacgggggagccgttcgcgctcaagacgacgcccaaggcggcgctgcgggcggacccgctggacctggcgctggcggagcaggagcccaaggtgcaccacctggcgtctgccgccagccgccacgtggtcgcgctgcacgccgccttcgtggacgccgacgccgtgcacctggtgctggacctgtgcgcgggcggggacctgttcgcgctcgtctccgcgcggggcgcgctcccggagcccgaggcggcggagctgatggcgcagctcgccgacgcgctcgccggctgccaccgccgcggggtcgcgcaccgcgacgtcaagcccgacaacctcctcttcgacgccgccgccggcggcgcgctcaggctcggggacttcggctccgccgcctggttcggggacggcaggcccatgacggggctggtcgggacgccctactacgtcgcgcccgaggtggtggccggcagggagtacaccgagaaggtggacgtctggagcgccggggtcgtgctctacatgatgctctccgggaccgtgcccttctccggcgccaccgcgggggagatcttccaggccgtgctccgcgggaacctgcgcttccctccgcgcgccttcgccgccgtctcgcccgaggccaaggacctcctgcgccgcatgctctgcagggacgtctggcgcaggctctccgccgagcaagtcctgagtcacccatggattgtgactcgcggcggaagtgtgcctggcggtagactggtttag

SEQ ID NO: 347 - protein, 286 aa, Zea mays
MGGAAEEALRREYVVGEEIGRGRFGTVRRCYAAATGEPFALKTTPKAALRADPLDLALAEQEPKVHHLASAASRHVVALHAAFVDADAVHLVLDLCAGGDLFALVSARGALPEPEAAELMAQLADALAGCHRRGVAHRDVKPDNLLFDAAAGGALRLGDFGSAAWFGDGRPMTGLVGTPYYVAPEVVAGREYTEKVDVWSAGVVLYMMLSGTVPFSGATAGEIFQAVLRGNLRFPPRAFAAVSPEAKDLLRRMLCRDVWRRLSAEQVLSHPWIVTRGGSVPGGRLV

SEQ ID NO: 348 - DNA, 1047 bp, Zea mays
atggccacgagaatagccttgtgtcttctcggccacgtcctcctcgccgtcgcgtcgatggcagtggcggcggcggccggtgacgcgggcaagatcggcatctgccacggccgcgttggcagtaacctcccgccgccgtcggccgccgcggcactgctcaagcggaacgggatcaccaaggcgcggctcttcctgccggacccggccgtgctcccggccttcgccgcggcgggcatcgacctcatggtgggcgtgcccaacgagaacctcaccttcctggccgcggcggggcccgagggcgcggcgcagtggctgcggtccgcggtcctggcccacgcccccgccgagcgcgtccggtgcctcgccgtcggcaacgaggtgctgtacaacaaccagttctatgcgcctcacctcgtgccggccatgcggaacctgcacgccgcgctcgccaccctggggctggacggcagggtcaaggtctcctccgcgcacgcctcctcggtgctggccgcctcgtacccgccctccgccggcgcgttcgacgccgcctccctccccgtcctccgccccatgctgcggttcctggccgacaccggtgcgcccttcatggtgaacgcctaccctttcatcagccacgtgaacgacccggcgaacgtgcagctcgcgtacgcgctcttcggagcgggcgcggcgccggtgcaggacggcgcgctggtgtacacgaacctgttcgacgccacggtagacgcgctggtggccgcgctggagaaggaggggttcgacggcgtgccggtcgcggtgaccgagaccgggtggccaaccgcggggcacccggccgccaccccgcagaacgccgcagcgtacaacgccaagattgtggagagggcggcgcgcggcgtcggcacgccgaagcggcccggcgtgcccgtggaggtgttcctgttcgacttgtacgacgaggacggcaagcccggccccgagttcgagcgccactttggcatcttcagggcggacggcagtaaggcgtatgacatcaactttgcctag

SEQ ID NO: 349 - protein, 348 aa, Zea mays
MATRIALCLLGHVLLAVASMAVAAAAGDAGKIGICHGRVGSNLPPPSAAAALLKRNGITKARLFLPDPAVLPAFAAAGIDLMVGVPNENLTFLAAAGPEGAAQWLRSAVLAHAPAERVRCLAVGNEVLYNNQFYAPHLVPAMRNLHAALATLGLDGRVKVSSAHASSVLAASYPPSAGAFDAASLPVLRPMLRFLADTGAPFMVNAYPFISHVNDPANVQLAYALFGAGAAPVQDGALVYTNLFDATVDALVAALEKEGFDGVPVAVTETGWPTAGHPAATPQNAAAYNAKIVERAARGVGTPKRPGVPVEVFLFDLYDEDGKPGPEFERHFGIFRADGSKAYDINFA

SEQ ID NO: 350 - DNA, 321 bp, Zea mays
atggcgccgtccatctccgtcggcgccgcggcgccgtcccgtgcagcgggcgcgagcacgaagaagagcgcggacgaggtggagctcctgcggcggcggaacgcggagctggagcgggaggtggcggcgctgcggctggagctgggcgcggcgcggcgccgcgccgagacggcggaagaggccgaggagcggctgtgcgtgcagctcggcgacgccgaggtggaggcgctcgagctcgcgcgcgcctaccaggcccacgtccacgagctcgccagggagctcgccgccgcgcgcgcggccccggcacgcccggccagatag

SEQ ID NO: 351 - protein, 106 aa, Zea mays
MAPSISVGAAAPSRAAGASTKKSADEVELLRRRNAELEREVAALRLELGAARRRAETAEEAEERLCVQLGDAEVEALELARAYQAHVHELARELAAARAAPARPAR

SEQ ID NO: 352 - DNA, 543 bp, Zea mays
atggcgccgcccaacgactccgagccatgcacgcaccaccggctgcccgcggacgagctgcagccgccgccgccggctacgtgctgcggcgccgctttggacgaccgggcgccggcggcggcatgggcgtcgtcgccgtccgagcctgaccaggtggcggcggcgcctgctgctcaggaggcggagaagaagcagaacagcgcgacgacgacggaggccgaagcagcagcgggaagcggcgccgggcgggagctggtggcggcgcggcggccgccggcggcggcggaggagagcgcgcgggagcggctgaagcggcatcgcaccgaaatggcggggcgggtgcggatcccggagatgtggggccaggagcggctgctcaaggactgggtcgactgcgccgtcttcgaccgcccgctcgccgccaccgcggggctgctcaccgcccgcgacgcgctcgtcgccgagtgcgccgccgcgcgccggccggccgtctcgcacggctccgcggggcgcccgctacgggtgcacaacggctgctcgtga

SEQ ID NO: 353 - protein, 180 aa, Zea mays
MAPPNDSEPCTHHRLPADELQPPPPATCCGAALDDRAPAAAWASSPSEPDQVAAAPAAQEAEKKQNSATTTEAEAAAGSGAGRELVAARRPPAAAEESARERLKRHRTEMAGRVRIPEMWGQERLLKDWVDCAVFDRPLAATAGLLTARDALVAECAAARRPAVSHGSAGRPLRVHNGCS

SEQ ID NO: 354 - DNA, 489 bp, Zea mays
atggccatgagagcgctcccgctgaccccttccaggagctcctcgtttggagctcaccaaaccaggccgagcggcggcggccccagatcagtgagagcttatgcgaagggagacgaggagggcgacaagcagtccctcttcggaagcatcaccgaggcgctggacttctcgcaggtccggtcggagaaggacgccgagctgctgtacgaggccagggagtccaccagaggtggagggaggatgacgagggagcagtacggagcacttaggcggaagattggtggcacctaccaggatttcttcaagtcatatgttgaagtcgacgggcaatacgtggaggagggttgggtcgacaagacctgcaagatctgcaagaaggacacaaggggggagccgaggcaggtcgacaagctaggaagatacgctcacgttgcgtgcctggagaaccccaaaccggcgaactttttcgccaaaatcttcgccagatga

SEQ ID NO: 355 - protein, 162 aa, Zea mays
MAMRALPLTPSRSSSFGAHQTRPSGGGPRSVRAYAKGDEEGDKQSLFGSITEALDFSQVRSEKDAELLYEARESTRGGGRMTREQYGALRRKIGGTYQDFFKSYVEVDGQYVEEGWVDKTCKICKKDTRGEPRQVDKLGRYAHVACLENPKPANFFAKIFAR

SEQ ID NO: 356 - DNA, 1269 bp, Zea mays
atggccaaatgctactcagattggcccccgattccgcctttccatccatcgcgaagaacgccgccgcaatcccacgcctccccgatcacgatcaggcggcagctcgcgtccttcgtgctccactgctccagatcctgcgctcccctcctcgagcccaagaacctgcccgatgagttcgaggccgtaccggcgacgccgccgccgccgctgccggacgccgccccgaagctggggatttctaacaagttcatccgaggcctctgcggtgacccgcagaccgagcagctggccttcgagggctacaggagggcgctgctgcagcccgagttccggctggagaagaagacggccaacgcgctgaccctgcagctgatcagggagaagcagtggggctccctggagctgctggtcgaggacttcagggcccacggcgtgctcccggagaagcggacgtgcgcgcggctcgtcgcctgctgcatcagggcggggaggttcggcctcgccgacgcggtgctcggggtcgtcgaggcgaagaagggagcccccgctgccatggccttcagcgcggccatgcaggcgtacaacaggctgcacatgtaccggagaacggtgcttctgtacgggcaggcgagggtggcccgcctgccgctgaacgccgacgcctaccgtgccgcgatggcggcgtgcggcgcgctgggcgagccggacatggtggcttcgctgttcaagctgtacaggtcccacaagtggtacccctccgacagctgcgtggagacgtacggcgtcgtctgcgacgcgctgggaaaggctggcagagccctggacgctctgcggtccctgcgcgagatggaagcggatgggctctcgaccgacgacgccatctactcctccgtcatcggcgctctggcagacgctcgagaaaaggcggcggccgaggacctgcgccccgaagcgtgggccaggaaaatgcttgaagatgccgacatgttcttgaaactgatcatcatgcacgtcaaggctggtctggttgagtcaacgatagaggttggcaaggacatgaggcagatcggactgagggtcacgggctgcagcctctctaccatcgtcaacggcttcgtgaagaggagaggcctgaaaccggccatcagagcgtatgacaagctggtcctcatagggtgcgagcctggccaggtcacctacgcatcagtcatcaacgtgtactgccggctcgggcgcacgacagagcagaggccatcttctccgagatga

SEQ ID NO: 357 - protein, 422 aa, Zea mays
MAKCYSDWPPIPPFHPSRRTPPQSHASPITIRRQLASFVLHCSRSCAPLLEPKNLPDEFEAVPATPPPPLPDAAPKLGISNKFIRGLCGDPQTEQLAFEGYRRALLQPEFRLEKKTANALTLQLIREKQWGSLELLVEDFRAHGVLPEKRTCARLVACCIRAGRFGLADAVLGVVEAKKGAPAAMAFSAAMQAYNRLHMYRRTVLLYGQARVARLPLNADAYRAAMAACGALGEPDMVASLFKLYRSHKWYPSDSCVETYGVVCDALGKAGRALDALRSLREMEADGLSTDDAIYSSVIGALADAREKAAAEDLRPEAWARKMLEDADMFLKLIIMHVKAGLVESTIEVGKDMRQIGLRVTGCSLSTIVNGFVKRRGLKPAIRAYDKLVLIGCEPGQVTYASVINVYCRLGRTTEQRPSSPR

SEQ ID NO: 358 - DNA, 687 bp, Zea mays
atggcgggaacttcgtcgtggtcgtcgtcttcatcctgcgcgtcgtcgttcgggtcgcccgaccacgacgtcgtctgcgtcaccgagccggactctgtgggcgccgcagccgtcgccgtcgccgacgccgagggaagcgtcaagttcctgtgcagctacggcggcaggatcctgccccgccgcaccgacggcacgctgcgctacgtcggcggcgacaaccgggtcctctccgtcgaccgtcccatccggttttacgtgttgcagcggaagctgagggaattgtgcggcggctgggaagcgcacctgcggtgtcagctaccgacggaggacctggacgcgctcatctccgtcacctgcgacgacgacctcgccaagctgctcgaggagtacgacgaggctagcaaggaccgcctccagtcgctcaagatccgggcgttcctgttcccgactaggacgccggcgccgtccatactacagcgtaggagcccgccgtcgattgctcacctccactggcaaaacacttccccgccggccgcagccggcgtctcgctgacgtgcgcgccgcggtggtgggcagcgccccaggcctctcgccaggcgcaggcgccccaggcgcagaactacgaccgacacagcctcggtgaggagcggccgcgcctgtactattcatatatgccacggacataa

SEQ ID NO: 359 - protein, 228 aa, Zea mays
MAGTSSWSSSSSCASSFGSPDHDVVCVTEPDSVGAAAVAVADAEGSVKFLCSYGGRILPRRTDGTLRYVGGDNRVLSVDRPIRFYVLQRKLRELCGGWEAHLRCQLPTEDLDALISVTCDDDLAKLLEEYDEASKDRLQSLKIRAFLFPTRTPAPSILQRRSPPSIAHLHWQNTSPPAAAGVSLTCAPRWWAAPQASRQAQAPQAQNYDRHSLGEERPRLYYSYMPRT

SEQ ID NO: 360 - DNA, 648 bp, Zea mays
atgtacgccagccaggtcgccgcgcggcggagtcccgacggcaggaagaggagcagggacagcctggagccgtcgaattcgggcgacgccaacgctgccgtcgagagcgccgccctcagcgacgagggcacgtgcaggcggatcaagctcaccagggtctgcaccaagatcgacccctccgacaccacgctcaccgtcaaagacggctaccagtggcgcaagtacggccagaaggtgacgcgcgacaacccgtccccgagagcctacttccgctgcgcatacgcaccatcctgccccgtcaagaagaaggtgcagaggagcgcggaggacagcgccatgctggtggccacgtacgagggcgagcacaaccacccgagcccgacgcgcgccggcgagctccccagctccacctccatcaactcctccggcccggccatcacgctggacctcaccaggaacggagccggcgccgtgcgggggctcgatgccgccgccgaggtgcccggcctcaagaggaagtgccaggagatcgcgtcaccggatttccgcacggcgctcgtggagcagatggcgcgctcgctcaccaaggatcccaagttcaccgacgcgctggctgccgcgatcctgcagcagctgccggagtactag

SEQ ID NO: 361 - protein, 215 aa, Zea mays
MYASQVAARRSPDGRKRSRDSLEPSNSGDANAAVESAALSDEGTCRRIKLTRVCTKIDPSDTTLTVKDGYQWRKYGQKVTRDNPSPRAYFRCAYAPSCPVKKKVQRSAEDSAMLVATYEGEHNHPSPTRAGELPSSTSINSSGPAITLDLTRNGAGAVRGLDAAAEVPGLKRKCQEIASPDFRTALVEQMARSLTKDPKFTDALAAAILQQLPEY

SEQ ID NO: 362 - DNA, 606 bp, Zea mays
atgcgggatgtttccagttccaggcacgccgatggaaggggcaggagtagggtggggtcaggagccggttacaccggggacggatacagttcttgggaagggcccgtgagaagccaagctctcttcgtggacgagaacaagtgcataggatgccgggagtgcgtgcaccatgccgctaggacgttcgccatggacgacgttctcggcagcgcgcacgtggaggtccagttcggcgacctggagcagcagattcagctggctgtggagtcctgccccgtggactgcatccactgggtcgagagccacgacctgcccgtgctggagttcctgtcccggccgcagccgaaggaaggccacggcgtattcggcggcgggtgggagcgccccgggaacgtgtttgcggcggcgaagaacttcgccaggagactggagagggagaagcagcgggaggagctggaacgggatcagccctccgggggcctcgacggggacgcaggccgcgaggcggagacggaggcgcaggccgaggcgaggcgcagcgcgtgggaggagctcaggtggaagcccctgcttgatgcttggaatgggctgataggtggtcgttga

SEQ ID NO: 363 - protein, 201 aa, Zea mays
MRDVSSSRHADGRGRSRVGSGAGYTGDGYSSWEGPVRSQALFVDENKCIGCRECVHHAARTFAMDDVLGSAHVEVQFGDLEQQIQLAVESCPVDCIHWVESHDLPVLEFLSRPQPKEGHGVFGGGWERPGNVFAAAKNFARRLEREKQREELERDQPSGGLDGDAGREAETEAQAEARRSAWEELRWKPLLDAWNGLIGGR

SEQ ID NO: 364 - DNA, 270 bp, Zea mays
atgaaggtacagtgcgacgtgtgcgcggccgaggcggcctccgtcttctgctgcgccgacgaggccgcgctgtgcgacgcatgcgaccgccgtgtccaccgcgccaacaagctcgcggggaagcaccgccgcttctccctcctgcacccgggttcttcctcttcctcctccgccgcgcacaagccgccgctctgcgacatctgccaggtactagctgtcagtgtttccagcctgatcgagcttgggctcggacggtgctttggtgcttgc

SEQ ID NO: 365 - protein, 90 aa, Zea mays
MKVQCDVCAAEAASVFCCADEAALCDACDRRVHRANKLAGKHRRFSLLHPGSSSSSSAAHKPPLCDICQVLAVSVSSLIELGLGRCFGAC

SEQ ID NO: 366 - DNA, 1257 bp, Zea mays
atgggtgtcatcggaggaacacctcctgcaagctgcccaacaacccggcactgcgcagaatgggcccgaatctacttgaagtactgcttgtgcagccagaaggaaggcgctgctctggcacttggactaatcagtgtcgtaagctggggcctcgccgaggtgccacagataatgacaaattacagacacaagtcaacagaggggctctctgtcgccttccttatgacctggattgttggagatttgtttaaccttgccggttgcttcctcgaacctgcaactctgccaactcagttctacatggcactgctatataccatcacaactctgattcttactggacagacgatctactatagccacatctaccatcatcttaaactaaaaaactccagggcagctagcaagcctcaaaagcatcaataccgggatgcttcattacgcgaaaagcttttgggtgccaagggcagtgcagcatcaagaaacaatgaatcagatactacagttcttattccaagctcacctatccctgttaatatgaaattggttgaccaataccatggaagcagctccaacgctgactactactacatgtcagcaaggtccttgtccaggagtccagtgccaactgctggtatatggtccggcagtaatcgtcaatcatcaagaagtcctccacaaatgaatgatcaaaggggatctttaattggtgagatcgctccggaacattctgcaccatctactgttacaaaaaatgccctctcagtggcaccatggatgggtcttctattgggtacgtgcctcttgcacattttgattggaaacaaacatagggagatggcaagtggcactgtcataccaattggaagaaggcttttactgtttgtggatgatcatggaaattcatcgcttagccagagcagtggaagtgaaattggaagctttcttggttgggctatggcaatgatttatatgggtgggcggcttccccagattttgttaaatatgcaaagaggccacgttgaggggctgaatccattgatgtttacctttgctttactgggaaattcaacatacgtaggaagtatacttgtaaatagcttggactggtcgaaacttagaccaaatctcccgtggcttgtagaatcgggaggatgtgttttgctggattcttgtattattcttcagttcctttatttccattatcggaaacgaagggagccttcggatgagcacgacaacgcagacaaagcctga

SEQ ID NO: 367 - protein, 418 aa, Zea mays
MGVIGGTPPASCPTTRHCAEWARIYLKYCLCSQKEGAALALGLISVVSWGLAEVPQIMTNYRHKSTEGLSVAFLMTWIVGDLFNLAGCFLEPATLPTQFYMALLYTITTLILTGQTIYYSHIYHHLKLKNSRAASKPQKHQYRDASLREKLLGAKGSAASRNNESDTTVLIPSSPIPVNMKLVDQYHGSSSNADYYYMSARSLSRSPVPTAGIWSGSNRQSSRSPPQMNDQRGSLIGEIAPEHSAPSTVTKNALSVAPWMGLLLGTCLLHILIGNKHREMASGTVIPIGRRLLLFVDDHGNSSLSQSSGSEIGSFLGWAMAMIYMGGRLPQILLNMQRGHVEGLNPLMFTFALLGNSTYVGSILVNSLDWSKLRPNLPWLVESGGCVLLDSCIILQFLYFHYRKRREPSDEHDNADKA

SEQ ID NO: 368 - DNA, 573 bp, Zea mays
atgggggagtacaacggcggcgtgagcacatcgtggaccattgggtcggcgcacggggggatggcgccacccacgcggcccaaaataaagatcatccacatcatcgcgccggagatcatcaagaccgacgtcgcgcacttccgggacctcgtgcagcggctcaccggcaagcctgcttcctgtgccgccagcagcacgggcgacgacgacgtcgcgtcgacgctgccgcccgtagaagacgaggacatggagacgacgaccaagaagaggccgaggccgaggccggcaccgcctccggcggccggtgagaggagcgacttcaccaaggcacaagaggagccggtcaagaagaggaagatcaagtgcgaggtgaaggtggaggagcaaggaactggcttcggcgattacgacctcggccgcggcgacctgtggatggatctcaacccgggagggttcctgagcttcttggaggaggagggcgtgttccagggcctggctgctgctgaccacgacttctttcagccctttggctcgtccaggatggatttggttggtgaaatgcacgcgtcttga

SEQ ID NO: 369 - protein, 190 aa, Zea mays
MGEYNGGVSTSWTIGSAHGGMAPPTRPKIKIIHIIAPEIIKTDVAHFRDLVQRLTGKPASCAASSTGDDDVASTLPPVEDEDMETTTKKRPRPRPAPPPAAGERSDFTKAQEEPVKKRKIKCEVKVEEQGTGFGDYDLGRGDLWMDLNPGGFLSFLEEEGVFQGLAAADHDFFQPFGSSRMDLVGEMHAS

SEQ ID NO: 370 - DNA, 1425 bp, Zea mays
atgggcgccctgttgctcttcgccgtctgcctgctggcgccgatcgtgctggcctgcgccgtccgtggcaggaagcggcgggccgccgcgccggcgccggcgccggcgtgcggcaagaaggcgctgccgctaccgcccgggtcgatggggtggccgtacgtgggcgagacgctccagctctactcgtccaagaaccccaacgtgttcttcgcccggaagcagaaccggtacgggccaatcttcaagacccacatcctgggctgcccctgcgtgatggtgtccagccccgaggcggcgcgcttcgtgctcgtcacgcaggcccacctcttcaagcccaccttcccggcgagcaaggagcgcatgctgggcccgcaggccatcttcttccagcagggcgactaccacgcccacctccgccgcctcgtctcccgggctttctccccccaggccatccgcgcctccgtgccggccatcgaggccatcgcgctgcgctcgctccactcctgggacggccgcctcgtcaacaccttccaagagatgaagctgtacgcgctgaatgtggcattgctgtccatcttcggcgaggaagagatgcggtacatagaggagctgaagcagtgctacctgaccctggagaaggggtacaactcgatgcccgtgaacctgccgggcaccctgttccacaaggccatgaaggcccgcaagcggctgagcgccatcgtggcccacatcatcgaggcccggcgcgagcggccgcggccgcgcgggagcgacctcctggcctccttcctggacggccgcgaggcgctcaccgacgcccagatctccgacaacgtgatcggcgtcatgttcgccgcccgcgacaccaccgccagcgtgctcacctggatggtcaagttcctcggcgaccacccggccgtcctcaaggcggtcatcgaggagcagcaggagatcgcgcggtccaaaggctcctccggcgagcccctgacgtgggcggacaccaggcggatgcgcacgacgagccgtgcgatccaggagacgatgcgggtggcgtccatcctgtccttcaccttccgggaggccgtggaggacgtggagtaccaagggtacctgatccccaagggctggaaggtgatgcccctgttccggaacatccaccacagccccgaccacttcccctgcccggagaagttcgacccctcccgattcgaggttgctcccaagcccaacacgttcctgccgttcggcaacgggacccactcgtgcccgggcaacgagctcgccaagctggagatgctcgtgctcttccaccacctcgccaccaagtacaggtggtccacctccaagtccgagagcggcgtgcagttcggccccttcgcgctgccgctcaacggcctgcccatgaccttcgtccgcaaggactga

SEQ ID NO: 371 - protein, 474 aa, Zea mays
MGALLLFAVCLLAPIVLACAVRGRKRRAAAPAPAPACGKKALPLPPGSMGWPYVGETLQLYSSKNPNVFFARKQNRYGPIFKTHILGCPCVMVSSPEAARFVLVTQAHLFKPTFPASKERMLGPQAIFFQQGDYHAHLRRLVSRAFSPQAIRASVPAIEAIALRSLHSWDGRLVNTFQEMKLYALNVALLSIFGEEEMRYIEELKQCYLTLEKGYNSMPVNLPGTLFHKAMKARKRLSAIVAHIIEARRERPRPRGSDLLASFLDGREALTDAQISDNVIGVMFAARDTTASVLTWMVKFLGDHPAVLKAVIEEQQEIARSKGSSGEPLTWADTRRMRTTSRAIQETMRVASILSFTFREAVEDVEYQGYLIPKGWKVMPLFRNIHHSPDHFPCPEKFDPSRFEVAPKPNTFLPFGNGTHSCPGNELAKLEMLVLFHHLATKYRWSTSKSESGVQFGPFALPLNGLPMTFVRKD

SEQ ID NO: 372 - DNA, 339 bp, Zea mays
atggaggagatcgacagcatcgagaagctcgacgacgcgctcaggtggtccgtcgagaacaaccagcccatcatcatcgactggatggcaagttggtgtcggaaatgcatatacctggtgcccagaatggagaagatagcaggagaatatcctggagtcaggttttacttcgtcgatgtcaacaaagttccacaggcggtggtgaaaagaggaaatgtaactaaaatgcccactattcagctctggaaggacggagagtggaaagcagaagtaataggtggtcacaaagcttggcttgtgatggatgaggtcagagaaatgatccagaagaacaagtga

SEQ ID NO: 373 - protein, 112 aa, Zea mays
MEEIDSIEKLDDALRWSVENNQPIIIDWMASWCRKCIYLVPRMEKIAGEYPGVRFYFVDVNKVPQAVVKRGNVTKMPTIQLWKDGEWKAEVIGGHKAWLVMDEVREMIQKNK

SEQ ID NO: 374 - DNA, 1023 bp, Zea mays
atggacggcctccacaccgagctcgcgctggggctgctggagtgcggcgttgttggcagcggaggcgagacagcgcccttcgtggccaagacctaccagatggtgtgcgacccgcggacggacgcgctcgtccgatggggcagcgagaacaacagcttcgtcgtcgccgaccccgccggcttctccaggctgctcctcccctgcttcttcaagcacagcaacttctccagcttcgtgcgccagctcaacacatacgggttccggaaggtacacccggaccggtgggagttcgcgcacgagtcgttcctgcgcggccagacgcacctgctgccgcgcatcgtgcgccgcaagaagcgcggcgagggagcctgcacctcctccggcggcgatgcgcaggcgcagtacgcggcggcggcggccggctgctgcatcagtatgggcggcgaggaccatcgtacggagggggaggcggaggcggcggtgctcgaggaggtgcagcggctgcggcaggagcagacggccatcggggaggagctggcccagatgagccggcgcctgcaggccacagagcggcggcccgaccagctcatgtccttcctcgccaggctcgccgaggaccccgacggcgtcacgcgccacctcgtcgagcaggccgccgagaagaagcgccgccgcatgatgcagctcgcctcccagcccgtccgccgcctcccgcctccgcctccgccaccgccagtactccaccacccgctgctggcgctcggaggcgccgccgccgccgccgccaagggcctggacggcggctgccaatgggcggagcagaagaagccgtctgtcgtgctcaccgccgccttcgatcatcccgccgccagctactgcggggcgcagcatgctgtgccgaatctcggaggcggcaacggcggcggcggcatcaacggcatgggcctgaccgctgacgagaccgcggtagagaccacgacgacccccttcccggtctgcctgctcggccagggtttcttttga

SEQ ID NO: 375 - protein, 340 aa, Zea mays
MDGLHTELALGLLECGVVGSGGETAPFVAKTYQMVCDPRTDALVRWGSENNSFVVADPAGFSRLLLPCFFKHSNFSSFVRQLNTYGFRKVHPDRWEFAHESFLRGQTHLLPRIVRRKKRGEGACTSSGGDAQAQYAAAAAGCCISMGGEDHRTEGEAEAAVLEEVQRLRQEQTAIGEELAQMSRRLQATERRPDQLMSFLARLAEDPDGVTRHLVEQAAEKKRRRMMQLASQPVRRLPPPPPPPPVLHHPLLALGGAAAAAAKGLDGGCQWAEQKKPSVVLTAAFDHPAASYCGAQHAVPNLGGGNGGGGINGMGLTADETAVETTTTPFPVCLLGQGFF

SEQ ID NO: 376 - DNA, 1050 bp, Zea mays
atggcggaatcaagcggctccggttccgtgtcggtggacgtcgagcggatctccttcggcggcaaggatcatcttgtgaggacgagatgtggttctgtaaccgttgccgtgtacggagacgaggacaagccagcgcttataacgtacccggatgtagctctgaactacctgtcctgtttccaagcatttttcttctgcccggaagtggcgtctttgctgctacacaacttctgtgtctaccacatcaatccccagggacacgagatgggagcagctccaatgtcgtcagatgtgccggtgccatctgttgatgatctcgctgatcaagtcgcagatgtgcttgatttcttcagtttaggatctgtgatgtgccttggtgtcaccgctggtgcgtatgttctcactctctttgcgacgaaataccgggagagggtaataggattgatgctggtttcccctctgtgcaagtccccgtcgtggagcgagtggctgtataataaagtgttattaaatttgctttattactacgggaatcaaggcctggtcaaggagtgcttgcttcaacggtactttagcaagaagctgcgtggggatgcacagtgtcctgaatccgacatagtgcgagccagtagaagtttacttgatgacaagcagggcgaaaatatctggcggtttcttcactcaataaacgagaggcatgacttaacagattcgttaaagaagctgcaatgccgcacgctgatcttcgtcggggagagctcacagttccacgaggatgctatccacatggccacaaaactggaccgcagatactgcgcgttagttgaggtgcaggactgtggctcccttgtgaccgaggagcagccccacgcgatggtgatgccaatggagtacttcctcatgggatacgggctctacaggccgtatcagctaagcagcagccctcgcagtccactgagcccatgctgtatatcgcctgagctgctgtctcctgagagtatgggtgtgaagctgaagccgataaagacccgggttggtatcagtttgtag

SEQ ID NO: 377 - protein, 349 aa, Zea mays
MAESSGSGSVSVDVERISFGGKDHLVRTRCGSVTVAVYGDEDKPALITYPDVALNYLSCFQAFFFCPEVASLLLHNFCVYHINPQGHEMGAAPMSSDVPVPSVDDLADQVADVLDFFSLGSVMCLGVTAGAYVLTLFATKYRERVIGLMLVSPLCKSPSWSEWLYNKVLLNLLYYYGNQGLVKECLLQRYFSKKLRGDAQCPESDIVRASRSLLDDKQGENIWRFLHSINERHDLTDSLKKLQCRTLIFVGESSQFHEDAIHMATKLDRRYCALVEVQDCGSLVTEEQPHAMVMPMEYFLMGYGLYRPYQLSSSPRSPLSPCCISPELLSPESMGVKLKPIKTRVGISL

SEQ ID NO: 378 - DNA, 1227 bp, Zea mays
atgcgccgcgccgaccaccttcctcagctcccgattccgctgccctgcatgggcgagcccaccgccgcctcccgcgtctcgccgggctcctccccggcccgctccgaggcctcgcgaggcgccccctgctacaacgccgacgccgagccggacccggacccggagccggagcccgaggcgtccgtggggcggagcacgcagatgctgctcgcgatggccgccatgggcgggcacggcgggcactacggccgccgcccggcctcgtcctacggcagctgcgccgcgtggagcgccgggtcgctcaccaggcaccgccccgcatcgccgtccccgatctgcagccccgcgaacagccacgacggcggcggcgaggaggacggtgacgacgcctcctcgtttgtcacgccacgggtggtcagttttcaagagcaaggcaggaccagagcagatttcatgaatccttctgctatgccacggaatatcagactgcagacacccaggcacccttctctgctggataggagagttgaaggcgccaatcaaatgcctccgagattcatccacaagaccacaccagctagatttatgcgccgagttcgctcctcacgtaatttccgacagcgcgtggatgcattagatgctaccaatgaatggagattgcccaaagtcagtgaaggggatgacgagggaggtgataaaaaagactggcagagcaataccgtgtcatctcgcgtatcttcagcccgtgattggaattttgagtctgacggtgcctatcagggtagcaatcgtagtgatcgtgcatttggcgattcagatggtgagaactgtccagttgaagtgcaaaggacagagagatggaccccgagctccgtgttaaaaccccaaggcaatttagtccatgctaagttggttgcctggaaggatgcgcagattgcaaagctcatagaaaagctgaaaaagaaagaagccgatattgatgattggcagaggaagaagaccataaaggccaggcagaagatgagaagcgctgagttgaagctggagaagaagagagcggaaatcgcagaaaagatgcaaaaggcaataaagcgtgcacaaaaaaaggctgataagaagaaagtcaaggagcaggtagccactaaagttcagattgatggtgttgagagagcattggataagatgtcaaggacaggaaaactcccctggtcactggcttttctgtga

SEQ ID NO: 379 - protein, 408 aa, Zea mays
MRRADHLPQLPIPLPCMGEPTAASRVSPGSSPARSEASRGAPCYNADAEPDPDPEPEPEASVGRSTQMLLAMAAMGGHGGHYGRRPASSYGSCAAWSAGSLTRHRPASPSPICSPANSHDGGGEEDGDDASSFVTPRVVSFQEQGRTRADFMNPSAMPRNIRLQTPRHPSLLDRRVEGANQMPPRFIHKTTPARFMRRVRSSRNFRQRVDALDATNEWRLPKVSEGDDEGGDKKDWQSNTVSSRVSSARDWNFESDGAYQGSNRSDRAFGDSDGENCPVEVQRTERWTPSSVLKPQGNLVHAKLVAWKDAQIAKLIEKLKKKEADIDDWQRKKTIKARQKMRSAELKLEKKRAEIAEKMQKAIKRAQKKADKKKVKEQVATKVQIDGVERALDKMSRTGKLPWSLAFL

SEQ ID NO: 380 - DNA, 942 bp, Zea mays
atgcggatgagctgcaacggctgccgcgtcctgcgcaagggctgcagcgacgcctgcaccatccgcccctgcctgcagtggatcaagtcccccgaggcgcaggccaacgccaccgtcttcctcgccaagttctacggccgggcggggctgctcaacctgctggccgcgccgcccgccgaccacctccgccccgccgccttccgctccctgctctacgaggcgtgcggccgcatcgtcaacccggtctacggctccgtcggcctgctctggtcgggccagtggcaggcgtgccaggccgccgtcgaggccgtgctcaagggcgaccccatcgtgcaggtgcaggtcgacgccgcgtccgacgcctcgccgccgctcggaccacgtcgccacgacatccgccacgtcgccagggaccccgccgccgcgcccgacgtcctcctccgcagcagcagccgcaagcgcgccgcgtcgtcttccacctcctccaagcacaaccagcccgggagcagtaagcgcgcgtcgctcggcaagaacaggcaaagggcagaacaagagccggtgcccatggtcgttgagcacggcgaggagtccgccggcagccacgaccacgaccacgaccagcaccaccgcctgcaggggtcggaggaggacaccgacgtggaggcggcttcccatgcccactcccacgtgagccaagccgagccagagcccgagcccgagaccgagccgcagagccacgcgccgccagcctgcagccagcagcaggctaaccaggagcatcaggacgacgaagacgaggagctcgcgctggagctcacgctcgggctggagccgctcgtcaggcagaggcagcggcccaagtcttcgcgcagcgactgcgatcacagcggactgagcgcggcgtcgagcctcatgtgcttgcgcctgcagctgccggcctga

SEQ ID NO: 381 - protein, 313 aa, Zea mays
MRMSCNGCRVLRKGCSDACTIRPCLQWIKSPEAQANATVFLAKFYGRAGLLNLLAAPPADHLRPAAFRSLLYEACGRIVNPVYGSVGLLWSGQWQACQAAVEAVLKGDPIVQVQVDAASDASPPLGPRRHDIRHVARDPAAAPDVLLRSSSRKRAASSSTSSKHNQPGSSKRASLGKNRQRAEQEPVPMVVEHGEESAGSHDHDHDQHHRLQGSEEDTDVEAASHAHSHVSQAEPEPEPETEPQSHAPPACSQQQANQEHQDDEDEELALELTLGLEPLVRQRQRPKSSRSDCDHSGLSAASSLMCLRLQLPA

SEQ ID NO: 382 - DNA, 501 bp, Zea mays
atgaacaggaagccaggagactgggactgcagggcgtgccagcacctcaacttcagccgtcgggatgcatgccagcgctgcagtgaaccacgtggagttggtgatcgtagcggcggtggtggcgacttgggtgggcgtggtggttcctccttcggcggtggctttggtgctggctctgatgtccgccctggtgactggtactgctcctgcggcgcacacaacttcgccagccgctccaactgcttcaggtgctctgcctacaaggaggaggctgccggcgcctttgatagtgacatgtcacgctcacgcggctacgccggcttcggcagcggcgctgccgcccgtaccaaccgccccggttggaagtctggagactggatctgcaccaggtccggttgcaacgagcacaacttcgctagcaggatggaatgtttcaggtgcaacgcgccacgggactccggtagcgctgccacgacgacctacgaaaactacttgcactga

SEQ ID NO: 383 - protein, 166 aa, Zea mays
MNRKPGDWDCRACQHLNFSRRDACQRCSEPRGVGDRSGGGGDLGGRGGSSFGGGFGAGSDVRPGDWYCSCGAHNFASRSNCFRCSAYKEEAAGAFDSDMSRSRGYAGFGSGAAARTNRPGWKSGDWICTRSGCNEHNFASRMECFRCNAPRDSGSAATTTYENYLH

SEQ ID NO: 384 - DNA, 438 bp, Zea mays
atgatcagctccaagaagctagctcagttgtccaagaagatgcagggaatgggtgcagttgggcgaagaagggtcacagtagtgagaaaggaaatcaacccatcttgcagcagcatagttgcagggaagggcaactgcatcgtctactcttctgatgggaagcggtttgagatccccctttcttacctccacacggcagtgtttgtagagctcctgaagctgtcgcaggaagagtttgggttcacaagtgatgggaggatcacactgccttgcgataaagcagtgatggagtatgtgatgtgtttgctaaggagagaagcctctgaggatgttgagaaggcgctcctcagttccatagtgatgtcttgccaccacacaaacaggatggtgcaaccaccaagtggagtgaaccaccacttcgctgtgtgcagctcctga

SEQ ID NO: 385 - protein, 145 aa, Zea mays
MISSKKLAQLSKKMQGMGAVGRRRVTVVRKEINPSCSSIVAGKGNCIVYSSDGKRFEIPLSYLHTAVFVELLKLSQEEFGFTSDGRITLPCDKAVMEYVMCLLRREASEDVEKALLSSIVMSCHHTNRMVQPPSGVNHHFAVCSS

SEQ ID NO: 386 - DNA, 405 bp, Zea mays
atgataaattcaaagatgctagttcagctggcaaagaagtggcaacatatggcagcccttgggaggaggaggctaacaatgaccacaacgatcaaagatggcaacctatactgcacatcagccatagcgaacaagggtcactgcatcgtatacacagctgacggtaagcgatttgaagtccctttggcgtatctcagtacaaacgtttttgtggagctcctgcggatgtccgaggacgagtttgggttcacaagtgaagacaggatcacagtgccttgtgatgccgaagtgatggagtatgtgatgtgcttgcttaggagaaagccctcagaagaagtggaaagggcggtccttaactctgttgtaatgccatgcaactatgaccatggtttccaagggtcttaa

SEQ ID NO: 387 - protein, 134 aa, Zea mays
MINSKMLVQLAKKWQHMAALGRRRLTMTTTIKDGNLYCTSAIANKGHCIVYTADGKRFEVPLAYLSTNVFVELLRMSEDEFGFTSEDRITVPCDAEVMEYVMCLLRRKPSEEVERAVLNSVVMPCNYDHGFQGS

SEQ ID NO: 388 - DNA, 1602 bp, Zea mays
atggggagaggcgacggggaaggagggatggcgacgcggggcggcgtggttgggtcgggggcaatgctggggctggacatgcacctcgccgcgcagcagatgcacccggccgccgccgcgttccagcaccagcaggaccaccaccacgatgggttccagctgcagcagccgcccccgccgccgtcgttctcgccctactccaacacgtcgtcgtccagggtcgtggtgagcgcggcgacggtggggcacgatgaagacacggtgggcaacggctgctgcgggaagggaggagtggtggtgcagcagcagcaacagcaacagatggcggcggcggggtgcccgtggacgaggatgaagtggaccgacgacatggtgcgcctgctcatcagcgtggtctacagcgttggggatgactgggagggcgcggcaatgcctggcggcgcggggggaggcaaggcgagcagggcgggctcgtcggggcacggccacggtcatgcggcggcggcgcagcagcagaagaagggcaagtggaagtcggtgtcgcacgccatgatggacaagggcttcgtggtgtcgccgcagcagtgcgaggacaagttcaacgacctcaacaagcgctacaagcgcgtggtcgacctgctcggccgcggccgcgcctgccgagtggtcgagaaccacgcgctgctcgacgccatcgacgagctcacgcccaaggccaaggacgaggcgcgcaagctactcagctccaagcacctcttcttccgcgagatgtgcgcctaccacaacagcggcgttgccgggggctcgcacctgccgccgcacgccggcggcggcgcggcgggcgacgccgcctgcctccaccacccgccgccggtgcccgtggccggcgcagcctcgtccgccgctcgccactaccaggcagccccgtccccgccgtgcatgaaggactcctccgccgacgtcgcggacgatgaagacgacagcgacgccgtgagcgacaacggcgaggaggacgaggacgactacgacgaggaggacgacggtcacatgtaccacagccacctcaccagtcgtcagcacagcggcggcggccgccggcgcggcaagcgcgagcatggcgaggatagcgccgcggccgaggacctcgaggacgaggcggccggcggtgggaaacgcgcgaggacgggggcggcacccgacccatcggcaatgctgcagcagttgaagagcgagctcgcggccgcggctgccgcggcgatggacccgcagcaggccaggtgctgggtgcgacgccgcgcggtggaggtggaggagcagcagatcctcctcgaatcccacgcgtacgacctggagcggcagcggctgaaatgggatcggttccgcgccaacaaagagcgcgacatggaacgcgcgcgcctgcagaatgaccgcctccggatccagagccgacgcttgctgctcatgctccggcacaaggaggtcgagctcgacatggccgaggccaactcttcctcggtcgaccaccaccccggcgcgtcgccgctcgcagcacaccagcagacaattgggtccagcccgtccaccgccggccacccaaattag

SEQ ID NO: 389 - protein, 533 aa, Zea mays
MGRGDGEGGMATRGGVVGSGAMLGLDMHLAAQQMHPAAAAFQHQQDHHHDGFQLQQPPPPPSFSPYSNTSSSRVVVSAATVGHDEDTVGNGCCGKGGVVVQQQQQQQMAAAGCPWTRMKWTDDMVRLLISVVYSVGDDWEGAAMPGGAGGGKASRAGSSGHGHGHAAAAQQQKKGKWKSVSHAMMDKGFVVSPQQCEDKFNDLNKRYKRVVDLLGRGRACRVVENHALLDAIDELTPKAKDEARKLLSSKHLFFREMCAYHNSGVAGGSHLPPHAGGGAAGDAACLHHPPPVPVAGAASSAARHYQAAPSPPCMKDSSADVADDEDDSDAVSDNGEEDEDDYDEEDDGHMYHSHLTSRQHSGGGRRRGKREHGEDSAAAEDLEDEAAGGGKRARTGAAPDPSAMLQQLKSELAAAAAAAMDPQQARCWVRRRAVEVEEQQILLESHAYDLERQRLKWDRFRANKERDMERARLQNDRLRIQSRRLLLMLRHKEVELDMAEANSSSVDHHPGASPLAAHQQTIGSSPSTAGHPN

SEQ ID NO: 390 - DNA, 1098 bp, Zea mays
atgggtattgagagcatgagccccacggcggcggcgccggaggacagctcttccgccgcgtccacggccaccacggagtccgccgccgccgcgcagccgccgcccgctgccgcaccaccaggcggcggcgcggtcggcggcggagacgccgtcgccgtctcgccggcggcggacgagcaggccgtcacgtcgcagccgtcggcggtgccgcagggctcctcgcgcttcaagggcgtggtgccgcagcccaacggccgctggggcgcgcagatctacgagcgccacgcccgggtgtggctcggcacgttcgccgacgaggaggccgcggcgcgcgcctacgacgtggccgcgctccgctaccgcggccgcgaggcggcgaccaacttcccgggcgccggcgcgtcggcgcccgagctcgccttcctggccgcccactccaaggcggagatcgtcgacatgctgcggaagcacacctacgccgacgagctgcgccagggcctgcgcgcggccgcagccgcgcgcagcccaccggcctgggcgcgcgtgctgctgttcgacaaggcggtcacgcccagcgacgtcggcaagctcaaccgcctcgtggtccccaagcagcacgccgagaagcacttcccgctgaagcgcgcgccgccgtcggtggaggcgaagggcgtgctcctcaacttcgaggacggggagggcaaggtgtggcggttccgctactcctactggaacagcagccagagctacgtgctcaccaagggctggagccgcttcgtcagggagaagggcctccgagccggggacaccatcgtcttctcccactccacgtacggctcggagaagcagctcttcatcgactgcaagaagaccaagacgacgacgcccgccaccgacggggtaccggtaccatcaccagcaccagcggagaaaccaagcgaggcccgtgtagtcaggctgttcggcgtcgacatcgccggagccgggtgccaccaccagaagcgcgcacggccggtggagatttcgttcgaccatgggccgcaggcggagtcgttcaagaagcaatgcgtgctcatcatcaccgctctcctgccctag

SEQ ID NO: 391 - protein, 365 aa, Zea mays
MGIESMSPTAAAPEDSSSAASTATTESAAAAQPPPAAAPPGGGAVGGGDAVAVSPAADEQAVTSQPSAVPQGSSRFKGVVPQPNGRWGAQIYERHARVWLGTFADEEAAARAYDVAALRYRGREAATNFPGAGASAPELAFLAAHSKAEIVDMLRKHTYADELRQGLRAAAAARSPPAWARVLLFDKAVTPSDVGKLNRLVVPKQHAEKHFPLKRAPPSVEAKGVLLNFEDGEGKVWRFRYSYWNSSQSYVLTKGWSRFVREKGLRAGDTIVFSHSTYGSEKQLFIDCKKTKTTTPATDGVPVPSPAPAEKPSEARVVRLFGVDIAGAGCHHQKRARPVEISFDHGPQAESFKKQCVLIITALLP

SEQ ID NO: 392 - DNA, 1218 bp, Zea mays
atgggcgctctctgtgatttctgtggggagcataggtctatggtttactgycgatcagatgcagcatccttgtgtttatcatgtgaccgtaatgtgcattcagctaatgctctttctcggcgtcatacaaggacacttttatgtgaccggtgtgcttcacagcctgctatggtccgctgtctagcagaaaatgcctcgctttgccaaaattgtgattggaatggccacattgcaggatcctcatctgccggacacaaaaggcagactataaattgctattcaggatgtccatcgtctgcagaactttctagaatatggtccttcgtttcagatattcctaatgtagcacctgagccaaactgtgagcaaggaataagcatgatgagcatcagcgacagtggtgtcagtaatcaagataatgctgcaggggacagtattttgttagatatagctagtgcaacacttgtaagtgatattggtacttgtgacaagcttttggtaggttcctcttcaggagctggagtgaacctacttccactggctactggtcaaacagaaacagctggatcttcctgtatgcaggttccctatacgccagataaagatatgttcagtaaggacagcatatatgaagatttttgtgtggatgacgctgaccttgctttcgaaaattatgaagaactctttggtacctctcatattcaaacagaacaactctttgatgatgctggaatagacatttactttgaaatgaaggaagcacctgctgggaattccactgagcagtccaagctgaagcaacctgcaaatagcaatgcggtatctgccgactctgggatgtcgaaccctggagtgaaaggtgattccagtgtttgtacccctttgaggcaggctaggtctagtctgtctctttcctttgctggtttgactggtgagagtagtgcgggagaccaccaagattgtgtggtatcatcattgcttcttatgggtgagcctccttggcagcctcctggccccgagggctcaattgctggaggtagtagagacagtgcactcacacgatacaaggagaagaaaatgagaagaaagttcgacaagaaaatcaggtacgcttctcgtaaggctagagcagatgtgcgaaagagggtaaagggtcggtttgttaaggctggtgaagcatatgactatgatcctctctgccaaacgaggagttactga

SEQ ID NO: 393 - protein, 405 aa, Zea mays
  VARIANT 17: Xaa = Any Amino Acid
  VARIANT 17: Xaa = Any Amino Acid
MGALCDFCGEHRSMVYXRSDAASLCLSCDRNVHSANALSRRHTRTLLCDRCASQPAMVRCLAENASLCQNCDWNGHIAGSSSAGHKRQTINCYSGCPSSAELSRIWSFVSDIPNVAPEPNCEQGISMMSISDSGVSNQDNAAGDSILLDIASATLVSDIGTCDKLLVGSSSGAGVNLLPLATGQTETAGSSCMQVPYTPDKDMFSKDSIYEDFCVDDADLAFENYEELFGTSHIQTEQLFDDAGIDIYFEMKEAPAGNSTEQSKLKQPANSNAVSADSGMSNPGVKGDSSVCTPLRQARSSLSLSFAGLTGESSAGDHQDCVVSSLLLMGEPPWQPPGPEGSIAGGSRDSALTRYKEKKMRRKFDKKIRYASRKARADVRKRVKGRFVKAGEAYDYDPLCQTRSY

SEQ ID NO: 394 - DNA, 291 bp, Zea mays
atggaaggcatcatcccgttcatcttcaaggtcatagcgcagtacaaagaagaaggacaggctgcctccttcggtggcatggcctccgacggttctgtcgaatcctccccgccggtgtcgtcgtcgtacgtgctcctgcctagtgactccgaccggcgccaccgcgacgagaggaacgacgacggccggccggtctgcccgacgtcgtccgtggactccggggccgtcaccacctgcaccgcgagaccgtctccgctccggtgctcgtcgacgctgcgccggcgagcctag

SEQ ID NO: 395 - protein, 96 aa, Zea mays
MEGIIPFIFKVIAQYKEEGQAASFGGMASDGSVESSPPVSSSYVLLPSDSDRRHRDERNDDGRPVCPTSSVDSGAVTTCTARPSPLRCSSTLRRRA

SEQ ID NO: 396 - DNA, 2922 bp, Zea mays
atggaggaggccacgcggcgccgtatcacgccgacgacgacgctgctgctggccctggcggtgctggcggcgagcgttcccgccggcttctgcgccatcaaccctcaggacgcttctgctctcaacgccatccagagccaatggacgaacgcccccttgagctggtcctcggcgagcgacccctgcgacgggggctgggacggaatcatgtgcagcaacggcagggtcacgtcgctgcggctgtcaagtgtcaacatccagggcacgctcagcgacagcgtcggacagctcacccagctcatgtacctggacgtttccttcaacctcggtctcaacggccgaatgcccgctacaatcgggaacctggcgcagctcaccacgctgatcctggcaggctgtagcttcaccggagccatcccacagcaactcggcaacctgcagcagctctcgttcctggcgttgaattcgaacaagtttaccggcacaataccccctacgctgggtctactctcgaacctcttctggctggatctggctgacaatcagctcactggatctatcccggtctccacagcaacaacgccggggctcgaccaacttacccacacgaagcacttccacttcaacaagaaccagctgtctggaacactcacaggcctcttcaactccaacatgagcctgatccacatactgttcgacagcaatcaactgactggcccgataccagaggagctagggggcatttcatcgctccaagttctccgactagataggaacagccttaagggaacgattcctcctaacatcagcaacttggtcaatctgaacgagctgaacttggccagcaaccagctcactggaccgttgccagatctaagcagcatgaccaaattgaatgtcgtggatttaagcaacaactccttcgccgtttcagcagccccaaactggttcacaactttaacatctctaacctccgtatcaatatcttctggaaagctttctggcgctgtccctaagggtctcttcaggttgccccagctgcagcaagttgtgctgagcaacaacgagttcaacgggacacttgaggtcacaggcaacatcagcagtcagcttcaggctatcaatctcatgaataacggcattgctgctgccaatgtcaccccaagctacaacaagactctagtgctactagggaacccgggctgcgtggacccagagttgaaagtcttctgcagcctcaagcaggagagaatgatagcgtacaacaccagcctggccaagtgctcctctacggcctcgtgttccagtgaccagcgcctgaaccctgcaaactgcggctgcgcatacccctacgccgggaagatggtattcagagcgccgctcttcacggacctgacgaacagcgccacctttcagcagctggaggcgagcttcacgacgcagttgtctctccgcgatggctccgtgttcctctccgacatccacttcaatagcgacaactacctccagattcaggtggcgcttttcccgtcgtctggggtgtccttcagcgtggcggatctgatacggataggcttcgatctgagcaaccagacttacaaaccaccgtcgaattttggaccctattacttcattgcagatccatacgctcttttggcaggtcttcgtggcagtaaaaaatcacatatcagcactggcgctatcgctggaattgcggtagccggtggaattcttgtgattgccctcattggcatggtattatttgcgttgcgacagaaaagaagggtcaaggaagtgacaggacgaaccgaccctttcgtttcatggggagtttcccagaaagacagtggaagggctccacagcttaaaggagcaaggttgttctctctgaatgagctgaagaactgcaccaacaatttttcggacacccatgagataggctcaggaggctatggaaaggtgtacaagggaacactcgttgatggaacgcgggttgccataaagagagcagagcgcggatcaatgcaaggtgtggtggagttcaagaacgagatcgagctgctgtccagggttcatcacaggaacctggtgagcctgattggcttctgctacgaacaaggggagcagatgctggtgtacgagtacgtctccagcggaacgctgagagagaacttactaggtatgagaggaacgtacctggactggaagaagaggctcaggatcgcgctcgggtcagcgaggggacttgcgtaccttcacgagctcgccgatccgcctatcatccaccgggacgtcaagtccaccaatatcctcctcgacgaccacctcaaagccaaggtcgccgacttcggcctctccaagctcgtcgcggacacccagaagggccacgtctccacgcaagtgaaaggaacgctgggttacttggatccggagtactacatgacgcagcagctgtcggagaagagcgacgtgtacagcttcggggtggtgatgctggagctggtgagcgggcggcagccgatcgagagcggcaagtacatcgtgcgcgaggtcaagctggccatcgaccccaacgaccgcgaccactacgggctgcggggcctcctggacccggcgatccgggacaacgcgcgcaccgccgggttcaggcggttcgtgcagctggcgatgctgtgcgtggacgagtcggcggcggcgcggccggccatgggcgaggtggtgaaggacatcgaggccatgctgcagaacgaggtctccgggcccgacggggccaccagctccgccggctcctccgccaacgacttcgacggcgccggcggcggagcgaggtcgcacccgtacagcgacgtcgagatcacgagaggctcgtacggggacaacgcgtcggactacatgccgtacttcgaggtcaagcctaagtag

SEQ ID NO: 397 - protein, 973 aa, Zea mays
MEEATRRRITPTTTLLLALAVLAASVPAGFCAINPQDASALNAIQSQWTNAPLSWSSASDPCDGGWDGIMCSNGRVTSLRLSSVNIQGTLSDSVGQLTQLMYLDVSFNLGLNGRMPATIGNLAQLTTLILAGCSFTGAIPQQLGNLQQLSFLALNSNKFTGTIPPTLGLLSNLFWLDLADNQLTGSIPVSTATTPGLDQLTHTKHFHFNKNQLSGTLTGLFNSNMSLIHILFDSNQLTGPIPEELGGISSLQVLRLDRNSLKGTIPPNISNLVNLNELNLASNQLTGPLPDLSSMTKLNVVDLSNNSFAVSAAPNWFTTLTSLTSVSISSGKLSGAVPKGLFRLPQLQQVVLSNNEFNGTLEVTGNISSQLQAINLMNNGIAAANVTPSYNKTLVLLGNPGCVDPELKVFCSLKQERMIAYNTSLAKCSSTASCSSDQRLNPANCGCAYPYAGKMVFRAPLFTDLTNSATFQQLEASFTTQLSLRDGSVFLSDIHFNSDNYLQIQVALFPSSGVSFSVADLIRIGFDLSNQTYKPPSNFGPYYFIADPYALLAGLRGSKKSHISTGAIAGIAVAGGILVIALIGMVLFALRQKRRVKEVTGRTDPFVSWGVSQKDSGRAPQLKGARLFSLNELKNCTNNFSDTHEIGSGGYGKVYKGTLVDGTRVAIKRAERGSMQGVVEFKNEIELLSRVHHRNLVSLIGFCYEQGEQMLVYEYVSSGTLRENLLGMRGTYLDWKKRLRIALGSARGLAYLHELADPPIIHRDVKSTNILLDDHLKAKVADFGLSKLVADTQKGHVSTQVKGTLGYLDPEYYMTQQLSEKSDVYSFGVVMLELVSGRQPIESGKYIVREVKLAIDPNDRDHYGLRGLLDPAIRDNARTAGFRRFVQLAMLCVDESAAARPAMGEVVKDIEAMLQNEVSGPDGATSSAGSSANDFDGAGGGARSHPYSDVEITRGSYGDNASDYMPYFEVKPK

SEQ ID NO: 398 - DNA, 843 bp, Zea mays
atggacatggacgccgaggctccgctcctcctccccatcgacatcaccatcgtgccgtcggcgccctcctcctccccttcgacccggagcatcgtcctccgcatagcggccgtgctcgccgtggcgtgcgcgtccctgctagcgcagcacgaggccagcaagggcttcgcagtcgccgtcgcgaacgacgcggcgcggggcagcgcggcggcgcggcgcttcgacctgcacttggcgtccaacggccgcgccgagcgcgccctcctgcgcgccagccgcgccgtggagcgcgcgctgttcccggacgcgtcgttcccgcgcaggcaggtgcggcgcgtgaccgtccggatggccgcgcgcaacctcaccgcgggcgccggcgccacggtgcgcgccgcggccccgggggagtacgtcgtgtccctgagccccggcctcgtcgcgtcgtcgtcggcgtcggcgaacgacgccgccgtggccgccgcgctgcgccgcgcggtcgcgcgcatgtggctctgggacggccgcggcgccgcccccgcgcgcgtcacggaggctatggtcgactacctcgcgggcgcggccggtgacgacgaggcggcggcggcggccgaggacgcgcacgggtgcggcacgttctcggcgcggcttctgaggcgcttagaggcgcggcgcgagggcttcgtggcgcggctgaaccgggcgatgaaggaccggtggagcgacgccgccgtggacgcggcgctcggcgcgccagcccggctcgcctgccgccaccacgcggaggaaacgacggcggcgctgacccgccgcgggcagctggaaaatggtggctggaggtga

SEQ ID NO: 399 - protein, 280 aa, Zea mays
MDMDAEAPLLLPIDITIVPSAPSSSPSTRSIVLRIAAVLAVACASLLAQHEASKGFAVAVANDAARGSAAARRFDLHLASNGRAERALLRASRAVERALFPDASFPRRQVRRVTVRMAARNLTAGAGATVRAAAPGEYVVSLSPGLVASSSASANDAAVAAALRRAVARMWLWDGRGAAPARVTEAMVDYLAGAAGDDEAAAAAEDAHGCGTFSARLLRRLEARREGFVARLNRAMKDRWSDAAVDAALGAPARLACRHHAEETTAALTRRGQLENGGWR

SEQ ID NO: 400 - DNA, 243 bp, Zea mays
atggccaccgagaccatccaggttccggcgccggccatgccggcagtagctgggcgcgccgccaccagaggcggcagcagggcgggcctgccgccgccgccgcggaggggccagatcaaggagaagatcctcaaggacgtcgtcgctgctgtctccgccatggccgcgggcctcgtcaagaatagccgcggcgacggcgaggagggtctcccggcctccgtcgacgccgacgacaacaagtga

SEQ ID NO: 401 - protein, 80 aa, Zea mays
MATETIQVPAPAMPAVAGRAATRGGSRAGLPPPPRRGQIKEKILKDVVAAVSAMAAGLVKNSRGDGEEGLPASVDADDNK

SEQ ID NO: 402 - DNA, 243 bp, Zea mays
atggccaccgagaccatccaggttccggcgccggccatgccggcagtagctgggcgcgccgccaccagaggcggcagcagggcgggcctcccgccgccgccgcggaggggccagatcaaggagaagatcctcaaggacgtcgtagctgccgtctcagccatggccgcgggcctcgtcaagcatagccgcggcgacggcgaggagggtctctcggcctccgtcgacgccgacgacaacaagtga

SEQ ID NO: 403 - protein, 80 aa, Zea mays
MATETIQVPAPAMPAVAGRAATRGGSRAGLPPPPRRGQIKEKILKDVVAAVSAMAAGLVKHSRGDGEEGLSASVDADDNK

SEQ ID NO: 404 - DNA, 435 bp, Zea mays
atggcgtcccaggccatcgagaaccaccgtgcaggcgctgaggtcgtcaccggaggagacgccatctgcaggaagaagtcaatcgagctgctggaggagctcggcctccccaagggcttcctgcccctcgaggacatccaggagttcgggtacaaccgcgagacagggttcatgtggctggtgcaggggaagaagaaggtggagcacaccttcaaaaagatcaagcagaccgtgtcgtacgccgctgaggtgacggcattcgccgagaagggcaagctgaggaagatcaccggcgtgaagacaaaggagctgatgctctggctcagcgtcgtcgaggtctacgtccccgaggcctcgccggagaaggttaccttcaagactggcactggcctatccgacaccttcgatgcatctgcctttgcgctgggagagtaa

SEQ ID NO: 405 - protein, 80 aa, Zea mays; identical to SEQ ID NO: 403

SEQ ID NO: 406 - DNA, 1557 bp, Zea mays
atgtactctctaccaggagcaaccatgtctgctgcacctgcacgcgtcatctcttcttcctcctcctccttcgtggagcctcttctccttgcagcagcttcgccggcggcggcggcggctgcaaacagccaccaccaagtccgccagcgcggccacttggtccgtactttggcggcatcatcgtcgtccaacacgctgctgcggagtgacttcgatctccaggagggcctgacgacggacgtgaaacggatgctgcgtcagcgtagcggcggcgggcgggagatgctggtcaccatcgacaacctcaagcgcctctgcatcgaccactacttcgaggaagagatcgagggcgccatggcgacggccgcctgcacgggtctcctccacagcgacgacctcttcgacgcaaccctcgcgttcaggctcctgagagaggcaggccatgatgtctcagcaaaagacgatgttctacggaggttcatcgacggcgtcagcggcgacttcaagatatctctgagcaacgacgtcagagggctcctgagcctgcacgacatgtcccacctggacgtgggaggggaggcggcgctgctccacagggccaaggagttctcgagcaggcacctcgcgtccgccgtcaggtacctggacgaccctagcctcgcggagtacgtgcggcagtccctggaccacccctaccacctcagcctcacgcagtacaaggccaggcatcacctccgctacctgcagagcctgccctgcagctgcagagacgccgccgtggagagactcgcggttgccgagttccagctcaacaagtcgctgcatcagagagagatgcgagagattaaaaggtggtggatggacctagggttggctgaagaaatacctgtggtgcgggatcaggtgatgaaatggtacatgtggtccatggcagccctccaaggatcttccttctccagataccgggtcgagatcaccaagataatctcgcttgtttacgtcgtcgacgacatattcgacctagttggcaccttggaggagctctccgccttcaccgaggcagtcaaaatgtgggatactgcggctgctgattcacttcccagttgcatgagatcatgctataaggccctccacaccgttacgaacgagatcgcagagattgcccagaaggagcatggatctaaccatgtcaatcgtcttaggaaagcatgggcggtgttgttcgacggtttcatggttgaggcgagatggctagcgaccgaccaagtccctacggcggaggactacctacgaaacggcgtcatcacatcaggagtgccgctcacatttatgcacatattcagcatgctagggtatgatgacccaagcaccgaggaagaagaagaagcgatcatcgaccacatgccctcaatcatctcctgcccagccaagatcctcaggctctgggatgacatgggcagcgcagaggtcgttgttagttcgtcgaaccatacactacatactagcttgttaattgaatgcttttaccttcaaattttgcaatccaatcatacttga

SEQ ID NO: 407 - protein, 518 aa, Zea mays
MYSLPGATMSAAPARVISSSSSSFVEPLLLAAASPAAAAAANSHHQVRQRGHLVRTLAASSSSNTLLRSDFDLQEGLTTDVKRMLRQRSGGGREMLVTIDNLKRLCIDHYFEEEIEGAMATAACTGLLHSDDLFDATLAFRLLREAGHDVSAKDDVLRRFIDGVSGDFKISLSNDVRGLLSLHDMSHLDVGGEAALLHRAKEFSSRHLASAVRYLDDPSLAEYVRQSLDHPYHLSLTQYKARHHLRYLQSLPCSCRDAAVERLAVAEFQLNKSLHQREMREIKRWWMDLGLAEEIPVVRDQVMKWYMWSMAALQGSSFSRYRVEITKIISLVYVVDDIFDLVGTLEELSAFTEAVKMWDTAAADSLPSCMRSCYKALHTVTNEIAEIAQKEHGSNHVNRLRKAWAVLFDGFMVEARWLATDQVPTAEDYLRNGVITSGVPLTFMHIFSMLGYDDPSTEEEEEAIIDHMPSIISCPAKILRLWDDMGSAEVVVSSSNHTLHTSLLIECFYLQILQSNHT

SEQ ID NO: 408 - DNA, 1176 bp, Zea mays
atgctggcctccgccgccaccgtcaagccctccaccgccgcggccgcggccacctgcaaggcggccttcaagccgctccacctccctcccctccccgccgccgccggcctcaggccgctctccctctccgtctccgcgcgcccgctgtaccgtcaggagcatgtcctcgcatccgtggcggtggcggcggctggccgcaacgaccgcgccgcgtcccccgcgccgccgtccgccaccgctgacggcgcccggccgctggaggtcgccgcgccggcggagaccgcgcgccgcgccaagatcggggtgtacttcgccacgtggtgggcgctgaacgtgatcttcaacatctacaacaagaaggtgctgaacgcgttcccgtacccgtggctcacgtcgacgctgtccctcgccgccggctccgccatcatgctcgcgtcctgggccaccaggatcgccgaggcgccccagacggacctcgacttctggaaggcgctcactcccgttgcgatcgcgcacacgatcgggcacgtcgcggcgacggtgagcatggccaaggtggccgtgtcgttcacgcacatcatcaagagcggggagccggcattcagcgtgctcgtctccaggttcttcctcggcgagcacttcccggcgccggtctacttctccctcctcccgatcatcggtgggtgcgcgctcgccgccgtcaccgagctcaacttcaacatggttgggttcatgggggcaatgatctcgaacctggcgttcgtcgtccggaccatcttctccaagaaggggatgaagggcaagtccgtgagcgggatgaactactacgcctgcctctccatcatgtcgctggtgatcctcctccccttcgccgtcgccatggagggacccaagctctgggcggcgggctggcagcaagcagtcgccgagatcggccccaacttcgtctggtgggtggctgcgcagagcgtgttctaccacctgtacaaccaggtgtcgtacatgtcgctggacgagatctcgccgctcacgttctccatcggcaacaccatgaagaggatctccgtcatcgtcgcctccatcatcatcttccagacgcccgtccagcccatcaacgcgctcggagccgccatcgccatcctcggaaccttcatctactcccaggcaaagcagtaa

SEQ ID NO: 409 - protein, 391 aa, Zea mays
MLASAATVKPSTAAAAATCKAAFKPLHLPPLPAAAGLRPLSLSVSARPLYRQEHVLASVAVAAAGRNDRAASPAPPSATADGARPLEVAAPAETARRAKIGVYFATWWALNVIFNIYNKKVLNAFPYPWLTSTLSLAAGSAIMLASWATRIAEAPQTDLDFWKALTPVAIAHTIGHVAATVSMAKVAVSFTHIIKSGEPAFSVLVSRFFLGEHFPAPVYFSLLPIIGGCALAAVTELNFNMVGFMGAMISNLAFVVRTIFSKKGMKGKSVSGMNYYACLSIMSLVILLPFAVAMEGPKLWAAGWQQAVAEIGPNFVWWVAAQSVFYHLYNQVSYMSLDEISPLTFSIGNTMKRISVIVASIIIFQTPVQPINALGAAIAILGTFIYSQAKQ

SEQ ID NO: 410 - DNA, 1149 bp, Zea mays
atgaaggtagagcgcgatctccacatgagccggggcgacggcgaggacagctacgcctccaactcaaggcttcaggagaagtccatactgaagacgaggccggtgctgcacaaggccgtggcggcggcgcacgccttgtcgctctcctcaggaggacccggcggcggcgccatggtcgtcgcggacctcggctgctcgtcggggcccaacacactgctcgtcgtctcggaggtgctagcagcggtggcgatggtggccggcggcagcgcccaaccgcagcacgtgcagttcttcctgaacgacctccccgggaacgactttaacctcgtcttccggtcgctggacctgttgaagaacaagaagctggccgccaaggacaggcgggaggagtcgctgctaccgccgtactacgtggccgggctgccgggctccttctacacccggctgttcccggaccactgcgtccacctcttccactcctcctactgcctcatgtggcgctccaaggtccccgacgagctcgccggtggcgcggtcctcaacgagggccacatgtacatctgggaaaccacgccgcaggcggtggtggccctgtacaggaggcagttccaggaggacatgtcgctgttcctcaggctgcgccacagggagctcgtgcccggtggccacatggtgctggcgttcctgggcaggaagaagagcaaggacgtgcttcgtggcgaggtcagctacacgtgggggctcctcgcgcaggctctccagtccctcgtcaaacagggccgtgtgaagaaggataagctggactccttcaacctgccgttctacgcgccgtcgatggacgaggtgagggacgtgatcacgcggagccaggcgttcgacatcacccacatccggctcttcgagtccaactgggatccacacgacgacgacgacgtggagatgaagatggaagaagacgtcgccgccgtccagagcggcgtcaacgtcgccaggtccatcagggccgtgatcgggcccctcatcgcccgccacttcggcgagcacatactcgacgatctcttcgagctgcatgccaagaatgtcgcagtgcacctgcagaaagtgaagaccaagtaccctgtcatcgtcgtttccctcgaggcgaaatga

SEQ ID NO: 411 - protein, 382 aa, Zea mays
MKVERDLHMSRGDGEDSYASNSRLQEKSILKTRPVLHKAVAAAHALSLSSGGPGGGAMVVADLGCSSGPNTLLVVSEVLAAVAMVAGGSAQPQHVQFFLNDLPGNDFNLVFRSLDLLKNKKLAAKDRREESLLPPYYVAGLPGSFYTRLFPDHCVHLFHSSYCLMWRSKVPDELAGGAVLNEGHMYIWETTPQAVVALYRRQFQEDMSLFLRLRHRELVPGGHMVLAFLGRKKSKDVLRGEVSYTWGLLAQALQSLVKQGRVKKDKLDSFNLPFYAPSMDEVRDVITRSQAFDITHIRLFESNWDPHDDDDVEMKMEEDVAAVQSGVNVARSIRAVIGPLIARHFGEHILDDLFELHAKNVAVHLQKVKTKYPVIVVSLEAK

SEQ ID NO: 412 - DNA, 1893 bp, Zea mays
  misc_feature 1696, 1697, 1698, 1699, 1700, 1701, 1702, 1703, 1704, 1705: n = A,T,C or G
  misc_feature 1696, 1697, 1698, 1699, 1700, 1701, 1702, 1703, 1704, 1705: n = A,T,C or G
atgaagttcatgaagctgggctccaagcccgacgccttccagtccgacggcgccgacgcatgcagatatgtggcctctgaccttgcaacagatgttgtggtgcatgttcgtgaagtaaagttttacttacacaagtttcccctcatttccaagagcagcaagcttcaaagattagttctgaaggccaccgaggacaagaccgatgaggtccgcatagatgaccttccagggggagcaaaatcattcgaaatatgtgccaagttctgctacggaatggtggtcaccctcagtccacacaacgttgtagcagcaagatgcgcagcacagtatcttgaaatgaccgaagagatggaaaaggggaacctgatatttaaaatcgaggtcttcataaactctagcatacttcgcagctggaaggactctatcatcgtcctccagagaacaaaggccctatcaccatggtctgaagagctgaaggttgtgggcagatgtatcgatgccatcgcttcgaagacgtctgcggatcctgccaatgtaacctggtcatacagtcataataacagcaagaagggaggagcttgtgctgaaatagtcgagtcggcaggaaaaccatcgatagctcccaaagattggtgggttgaggacttgtgtgaattggatgttgacctgtataggagagtcatggttgctatcaaatccaaggggagaatgtcacctgaactgataggagaggcacttaaggcatatgcggttagatggctgccagactcctacgatgcactggttgccgagggtcacatgaggaggaaccaatgtctggtcgagacactaatatggttgttgccttctgataagagctcaggctgttcttgcargtttctcttgaaactgctgaaggtggctatactagtgggaggcggggagcacgtgaaggaagaactcatcagaaggatcagcttccagttgcacaaagctactgtgaaggatctcttgctacctgctacctcgccgcctaatgatggtacatatgatgttcggttggtgcatgatcttgtgcagagatttgttgcgagaaccgcgctgtctcataatggcggtttcattgagaagtctgatgagaagatgatcgagctcaactttgagcaagaatcaaccttggcggtgggagagcttgttgatggctacctgtctgaagtagcttcagatcaagccccttcactgcctatgtttgttgaactagcgacagccgtgcccgaagcggctaggccagttcatgacaacctgtactatgcagtcgatgcatatctcaagcaacacccagacataaacaaatccgagaagaagaagatctgcagtctggtggatgtcaagaagctcagcacagacgcatccatgcacgccacacaaaacgaccgcctgcctctccggttggtggttcaggtcctcttcttccagcagctgagggccggcccaagcaaagaactcgccctgattgacaacggagaacacgcttgcacacggcctacgcaggatcaatgcgaacccggcgaaaggcggataccgaagcatccaaactcactaaataagcaggtgacaagcctgagcgcgagagagagccgccagcaccaccggaccagcgacagcgagcacaggggcggcggcaggaacagcttcaaagaccagctcgggggccgtnnnnnnnnnncgactgcgagctcaggggctgtggcagcgccagctcccaggtcggataaatcctgccgcagtcgcgatccaggaggatcttcgacaagctgtggagcagcaaagggcaaggcgagcatggcggcaaaggctcggagacgtctggcagctcccagagcccaccgttgtcagcaaagcctgcagaagtga

SEQ ID NO: 413 - protein, 630 aa, Zea mays
  VARIANT 292, 566, 567, 568, 569: Xaa = Any Amino Acid
  VARIANT 292, 566, 567, 568, 569: Xaa = Any Amino Acid
MKFMKLGSKPDAFQSDGADACRYVASDLATDVVVHVREVKFYLHKFPLISKSSKLQRLVLKATEDKTDEVRIDDLPGGAKSFEICAKFCYGMVVTLSPHNVVAARCAAQYLEMTEEMEKGNLIFKIEVFINSSILRSWKDSIIVLQRTKALSPWSEELKVVGRCIDAIASKTSADPANVTWSYSHNNSKKGGACAEIVESAGKPSIAPKDWWVEDLCELDVDLYRRVMVAIKSKGRMSPELIGEALKAYAVRWLPDSYDALVAEGHMRRNQCLVETLIWLLPSDKSSGCSCXFLLKLLKVAILVGGGEHVKEELIRRISFQLHKATVKDLLLPATSPPNDGTYDVRLVHDLVQRFVARTALSHNGGFIEKSDEKMIELNFEQESTLAVGELVDGYLSEVASDQAPSLPMFVELATAVPEAARPVHDNLYYAVDAYLKQHPDINKSEKKKICSLVDVKKLSTDASMHATQNDRLPLRLVVQVLFFQQLRAGPSKELALIDNGEHACTRPTQDQCEPGERRIPKHPNSLNKQVTSLSARESRQHHRTSDSEHRGGGRNSFKDQLGGRXXXXTASSGAVAAPAPRSDKSCRSRDPGGSSTSCGAAKGKASMAAKARRRLAAPRAHRCQQSLQK

SEQ ID NO: 414 - DNA, 2301 bp, Zea mays
atgggcagtgcttgccaagctggcacagacgggccttcccgcaaggatgtgttagggatagggaatgccgccttagagaatggccaccatcaggctgaagctgacgcagatgaatggagggaaaaggaagaggacttggccaacaacgggcacagtgcgccaccgccaggcatgcagcaggtggatgagcataaggaggaacaaagacaaagcattcactgggagaggttcctacctgtgaagacactgagagtcttgctggtggagaatgatgactctactcgtcaggtggtcagtgccctgctccgtaagtgctgctatgaagttattcctgctgaaaatggtttgcatgcatggcgatatcttgaagatctgcagaacaacatcgaccttgtattgactgaggttttcatgccttgtctatctggtatcggtctgcttagcaaaatcacaagtcacaaaatttgcaaagacattcctgtgattatgatgtctacgaatgattctatgagtatggtgtttaagtgtttgtcgaagggagcagttgatttcttggtaaaaccactacgtaagaatgagcttaagaacctttggcagcatgtttggaggcgatgccacagttccagtggaagtgaaagtggcatccagacacagaagtgtgccaaactaaatactggcgacgagtatgagaacggcagtgacagcaatcatgatgatgaagaaaatgatgacggcgacgatgacgacttcagtgttggactcaatgctagggatggaagtgacaatggcagtggtactcaaagctcatggacaaagcgtgctgtggagattgacagcccacaacctatatctcccgatcaactagttgatccacctgatagtacatgtgcacaagtaattcaccctagatcagagatatgcagtaacaagtggttaccgacagcaaacaaaaggaatgtcaagaaacagaaggagaataaagatgaatctatgggaagatacttaggaataggtgctcctaggaactcaagtgcagaatatcaatcatctctcaatgatgtatctgttaatccaatagaaaaaggacatgagaatcacatgtccaaatgcaaatctaaaaaggaaacaatggcagaagatgattgtacaaacatgcctagtgcaacaaatgctgaaactgctgatttgattagctcaatagccagaaacacagaaggccaacaagcagtacaagccgttgacgcaccagatggcccttccaaaatggctaatggaaatgataagaatcatgattctcatatcgaagtgacaccccatgagttgggtttgaagagatcgagaacaaatggagctacagcggaaatccatgatgagcgaaatattctgaaaagatcagatcagtcagccttcaccaggtaccatacatctgtggcttccaatcaaggtggagcaagatatggggaaagctcttcaccacaagataacagttctgaggccatgaaaacggactctacatgcaagatgaagtcaaattcagatgctgctccaataaagcagggctccaatggcagtagcaataacgatgtgggatccagtacaaagaatgttgctgcaaggccttcgggtgacagggagagagtagcgtcaccattagccatcaaatctacccagcatgcctcagcatttcatactatacagaatcaaacgtcaccagctaatctgattggggaagacaaagctgatgaaggaatttccaatacagtgaaaatgagccacccaacagaggttccacaaggctgcgtccagcatcatcatcatgtgcattattacctccatgttatgacacagaaacagccatcaacagaccgtggatcatcagatgttcactgtggttcgtcaaatgtgtttgatcctcctgttgaaggacatgctgcaaactacagtgtgaatgggggtgtctcagttggtcataatgggtgcaatgggcagaatggaagtagcgctgtccccaatattgcaagaccaaacatagagagtattaatggtaccatgagccaaaatattgccggaggtggcattgtaagtgggagtgggagtggcaatgacatgtatcagaatcggttcctgcaacgagaagctgcattgaacaaattcagactgaagcggaaagatcggaactttggtaaaaaggttcgctaccaaagcaggaagaggcttgctgagcagcggccacgggtccgaggacagtttgtgcgacaatctgagcaagaagatcaaacagcgcaaggttcagaaagatga

SEQ ID NO: 415 - protein, 766 aa, Zea mays
MGSACQAGTDGPSRKDVLGIGNAALENGHHQAEADADEWREKEEDLANNGHSAPPPGMQQVDEHKEEQRQSIHWERFLPVKTLRVLLVENDDSTRQVVSALLRKCCYEVIPAENGLHAWRYLEDLQNNIDLVLTEVFMPCLSGIGLLSKITSHKICKDIPVIMMSTNDSMSMVFKCLSKGAVDFLVKPLRKNELKNLWQHVWRRCHSSSGSESGIQTQKCAKLNTGDEYENGSDSNHDDEENDDGDDDDFSVGLNARDGSDNGSGTQSSWTKRAVEIDSPQPISPDQLVDPPDSTCAQVIHPRSEICSNKWLPTANKRNVKKQKENKDESMGRYLGIGAPRNSSAEYQSSLNDVSVNPIEKGHENHMSKCKSKKETMAEDDCTNMPSATNAETADLISSIARNTEGQQAVQAVDAPDGPSKMANGNDKNHDSHIEVTPHELGLKRSRTNGATAEIHDERNILKRSDQSAFTRYHTSVASNQGGARYGESSSPQDNSSEAMKTDSTCKMKSNSDAAPIKQGSNGSSNNDVGSSTKNVAARPSGDRERVASPLAIKSTQHASAFHTIQNQTSPANLIGEDKADEGISNTVKMSHPTEVPQGCVQHHHHVHYYLHVMTQKQPSTDRGSSDVHCGSSNVFDPPVEGHAANYSVNGGVSVGHNGCNGQNGSSAVPNIARPNIESINGTMSQNIAGGGIVSGSGSGNDMYQNRFLQREAALNKFRLKRKDRNFGKKVRYQSRKRLAEQRPRVRGQFVRQSEQEDQTAQGSER

SEQ ID NO: 416 - DNA, 2196 bp, Zea mays
atggggagaggagggatcggaggcgcggcggccatggccatggccatggagaccgccgatcctgcccgtgcattcgtgaaggacgtcaagcgaatcattatcaaggtgggcacggctgttgtcactggcatgaatggccgattggccatggggaggctcggttctctctgtgaacaggtgaagcaactgaattttcaagggtatgaggtgattctggtaacctcaggagctgttgggggtgggaggcagaggctccaataccgtaaacttatccatagcagcttcgcagatctgcaaaatcctcagatgaactttgatggaaaggcatgtgctgctgttggtcaaagtgtcctgatggcgatctatgacacattatttagccaacttgatgtaacgtcatctcaacttcttgtgacggatcgtgatttcaaggatccaagttttggggaccagctccgtgagactgttttttcactgttagatcttaaagtagtacccttatttaatgagaatgatgccatcagtacccggagacagccatatgaggattcatctggtatattctgggataatgacagtctagcagctctgttggcagcagaacttaatgctgatcttcttatcatgcttagtgatgtggaaggactctatagtggtccaccaagcgatcctcagtcaaagattatccacacatatgtcaatgaaaagcatgggaagctaattagttttggagagaagtctagtgttggaagaggtggcatgcaagctaaagtgtctgctgctgctaatgctgcatcaaaaggtgtacctgttgtcattgcaagtgggtttgcaacggatagcatcattacagttctcaaaggcgaaaagatcggtacacttttccacaacgaagcaaatttgtgggcatgttccaaggaagctacagcccgagagatggcagttgcggcaagagactgttcgaggcgtctacagaagttgtcatcagaggaacgcaaacagattttgctagatattgctgatgctctggaagcaaatgaggatgcaattaggtctgaaaatgatgccgatgttgaggcagcacaagttgctggttatgaaaagtcgttggttgctaggatgaccctaaagccaggaaagataacaaatcttgcaagatccattcgtaaaactgctgacatggaggaccctatttcccatacattgaaaagaacagaggttgctaaagatctggtttttgagaaagcatattgcccattgggtgttcttctcattatttttgagtctcgtcctgatgcattggtccagattgcatctctagcgatccgaagtggtaatggtctccttttgaaaggagggaaagaagttatgagatcaaatgcaatattacacaaggtcataactggagttattcccgatactgttggcaaaaagctcataggccttgtgactagcaaagaggaaattgctgatctactagcgcttgatgatgtaattgatcttgtcattccgagaggtagtaagtctctagtttcccaaatcaaagcaacaactaagattccagttttaggtcatgctgatggtatctgccatgtttacattgacaaatcagccgacatggatatggcaaaacggatagtattggatgctaagattgattatccagcagcatgtaatgcaatggaaacactacttgttcataaagatcttaacaagagtgagggacttgatgatctattagtggaacttgaaaaggaaggagtagttatttatggtggacctgttgcacatgacaagttgaaagtaccaaaggtagactcatttcgtcatgagtatagctcaatggcatgcacagtcgaatttgttgatgatgtgcagtcagctatcgatcacataaatcgttatggaagtgcacacacagactgcatcatcacaactgatagaagtgctgcagaggcctttctgcagcaagttgatagtgccgctgtgtttcataatgcaagcacaaggttttgtgatgggacgcgttttgggctaggtgctgaggttggcataagtacagagcgcatacatgcccgcggacctgttggagttgatggacttctaactactcgctgcattttgcgcggtagtggacaagtggtgaatggtgacaagggagtggtttacacccacaaggatcttcctttgcaatga

SEQ ID NO: 417 - protein, 731 aa, Zea mays
MGRGGIGGAAAMAMAMETADPARAFVKDVKRIIIKVGTAVVTGMNGRLAMGRLGSLCEQVKQLNFQGYEVILVTSGAVGGGRQRLQYRKLIHSSFADLQNPQMNFDGKACAAVGQSVLMAIYDTLFSQLDVTSSQLLVTDRDFKDPSFGDQLRETVFSLLDLKVVPLFNENDAISTRRQPYEDSSGIFWDNDSLAALLAAELNADLLIMLSDVEGLYSGPPSDPQSKIIHTYVNEKHGKLISFGEKSSVGRGGMQAKVSAAANAASKGVPVVIASGFATDSIITVLKGEKIGTLFHNEANLWACSKEATAREMAVAARDCSRRLQKLSSEERKQILLDIADALEANEDAIRSENDADVEAAQVAGYEKSLVARMTLKPGKITNLARSIRKTADMEDPISHTLKRTEVAKDLVFEKAYCPLGVLLIIFESRPDALVQIASLAIRSGNGLLLKGGKEVMRSNAILHKVITGVIPDTVGKKLIGLVTSKEEIADLLALDDVIDLVIPRGSKSLVSQIKATTKIPVLGHADGICHVYIDKSADMDMAKRIVLDAKIDYPAACNAMETLLVHKDLNKSEGLDDLLVELEKEGVVIYGGPVAHDKLKVPKVDSFRHEYSSMACTVEFVDDVQSAIDHINRYGSAHTDCIITTDRSAAEAFLQQVDSAAVFHNASTRFCDGTRFGLGAEVGISTERIHARGPVGVDGLLTTRCILRGSGQVVNGDKGVVYTHKDLPLQ

SEQ ID NO: 418 - DNA, 837 bp, Zea mays
atgggaatggggcctctcgagaacgccgcgtcggccgctgagtccgcggccttgccggaggccggcgccgccgcggcagcgggctcgtacgcggtgctgcagtgcggcgaggactcggagtacgtgcggcagaagtacggcggctacttcgccgtcttccgcgcgctgctggaggaggacggcgagagctggcgcgtgtacagcgccgtccgcggggagctccccaccgacgccgaggcggccggcttcgacgggttcgtcatctccgggagctgctccgacgcgcacggcgacgagccctggatcctcgcgctcgtcgacctcacccgccgcgtccacgccgccggcaagcgcgtcctcggcgtctgcttcggccaccagatcctgtgccgggcgctgggcgggcgcacggggcggtcggccaagggctgggacatcggggtgagctgcatccacccgacggcggcggcggcgcggctgttcgcgccgctgaagctgcccgtgcacatgccggtgatcgagttccaccaggacgaggtgtgggagctgccccccggcgccgaggcgctggcgcggtccgacaagacccgcgtcgagatgttccgcctcggcggccgcgccatgggcgtccagggccacccggagtacagcaaggacgtcctcatgagcatcgccgaccgcctcctccgccacaaccacatactggactgccaggtggaagtggccaagacgagcttcgacgtgcggcagccggacaaggagctgtggagcaaggtgtgcaggggcttcctcaagggaaggctccagtcgtcgcagcagcaaggtgtggcgctatag

SEQ ID NO: 419 - protein, 278 aa, Zea mays
MGMGPLENAASAAESAALPEAGAAAAAGSYAVLQCGEDSEYVRQKYGGYFAVFRALLEEDGESWRVYSAVRGELPTDAEAAGFDGFVISGSCSDAHGDEPWILALVDLTRRVHAAGKRVLGVCFGHQILCRALGGRTGRSAKGWDIGVSCIHPTAAAARLFAPLKLPVHMPVIEFHQDEVWELPPGAEALARSDKTRVEMFRLGGRAMGVQGHPEYSKDVLMSIADRLLRHNHILDCQVEVAKTSFDVRQPDKELWSKVCRGFLKGRLQSSQQQGVAL

SEQ ID NO: 420 - DNA, 1914 bp, Zea mays
atggagagaacactgatcacctctaacctctgcttgagtgcacacgcttcaagatcgtcccggagggttcactacatccctccttccgcctctgctgctgcacacaactccagctacaggaagaagagtgccccgtctctgccgccgtcggccgccgcatctgccactgttgtcaccgcccctccgtccactgacaatgtccagtccactgctccgaaacagaccgggcgacaggagctggaagatctcgtggccgccaagaccagcacttcaagaactgcacgtgcgccgagccaggctcgggctcgggctcgggctgagcctcgccgccggcctgccccggcagccacgtccctgccaatggcgttctgcagcgcgctggaggaggcgatcaacacgttcgtcgaccctccggcgctgcggccgtccgtggacccccggaacgtgctgtcgaccaacttcgcgccagtggacgagctgccgccgacgccctgccccgtcgtgcgcggcgcaatcccgcgctgcctcgccggaggggcctacatccggaacgggcccaacccccagcacctcccgcgtgggccgcaccacctcttcgacggcgacggcatgctgcactcgctcctcctcccgacggcggagtcgccgtcgtcggaccccgtcctgtgctcgcgctacgtgcagacgtacaagtacctcgtggagcgcgacgcaggagcgccggtcatgccgaacgtcttctccggattccacggcgtggctgggctggcgcgcggcgccgtcgtggcggccagagtactcactgggcagatgaacccagccgagggcgtggggctcgctaacaccagcctcgtcttcttcggcggccgcctctacgcgcttggcgagtcggatctcccgtacaccgtgcgcgtcgacccggccaccggcgaggtgaccacgcacggccggtgcgacttcggcggccgcctcttcatgggcatgaccgctcacccgaagaaagaccccgtcaccggcgaggtcttcgcgttccgctacggccccgtgccgccgttcgtcacctacttccggttcgacccggccgggaacaagggccccgacgtgcccatcttctcggtgcagcagccgtcgttcctgcacgacttcgccgtcacggagcggtacgccatcttcccggagatacagatcgtcatgcagcccatgggcatggtgacgggcggcgcgcccgtggggtctgactccggcaaggtgccccggctcggcgtgctcccgaagtacgccacggacgagtcggagatgcggtggttcgaggtgccgggcttcaacatgatgcactcgctgaacgcgtgggaggaggccgacggcgaggagctggtgctggtggcgcctaacgtcctgtccgtggagcacgcgctggagcgcatggagctcgtgcactcctgcgtcgagaaggtgcgcatgaacctgcgcacgggcgccgtgtcgcgcaccccgctctcggcggggaacctcgacttcggcgtaatccacccgggataccttggccggcgcaaccggtacggatacctcggcatcggcgaccccatgccgaagatcgccggggtggccaagctggacttggaccgcgccggcacgggcgactgcacggtggcgcggcgcgacttcgggcccgggtgcttcgcgggggagccgttcttcgtccccgacgacgtggaggggaatggcaacgaggacgacggctacttagtgtgctacgtccacaacgagcggaccggcgagaaccagttcgtggtgatggacgcgaggtcggcgcagctggacatcgtcgccgaggtgcagctgccagcgcgcgtcccctatggcttccacggcatgtttgtcacgcaggccgagctccaggcgcagcagcaatga

SEQ ID NO: 421 - protein, 637 aa, Zea mays
MERTLITSNLCLSAHASRSSRRVHYIPPSASAAAHNSSYRKKSAPSLPPSAAASATVVTAPPSTDNVQSTAPKQTGRQELEDLVAAKTSTSRTARAPSQARARARAEPRRRPAPAATSLPMAFCSALEEAINTFVDPPALRPSVDPRNVLSTNFAPVDELPPTPCPVVRGAIPRCLAGGAYIRNGPNPQHLPRGPHHLFDGDGMLHSLLLPTAESPSSDPVLCSRYVQTYKYLVERDAGAPVMPNVFSGFHGVAGLARGAVVAARVLTGQMNPAEGVGLANTSLVFFGGRLYALGESDLPYTVRVDPATGEVTTHGRCDFGGRLFMGMTAHPKKDPVTGEVFAFRYGPVPPFVTYFRFDPAGNKGPDVPIFSVQQPSFLHDFAVTERYAIFPEIQIVMQPMGMVTGGAPVGSDSGKVPRLGVLPKYATDESEMRWFEVPGFNMMHSLNAWEEADGEELVLVAPNVLSVEHALERMELVHSCVEKVRMNLRTGAVSRTPLSAGNLDFGVIHPGYLGRRNRYGYLGIGDPMPKIAGVAKLDLDRAGTGDCTVARRDFGPGCFAGEPFFVPDDVEGNGNEDDGYLVCYVHNERTGENQFVVMDARSAQLDIVAEVQLPARVPYGFHGMFVTQAELQAQQQ

SEQ ID NO: 422 - DNA, 1179 bp, Zea mays
atggacgccagcccggccccgccgctcctcctccgcgcccccactcccagccccagcattgacctccccgctggcaaggacaaggccgacgcggcggccagcaaggccggcgcggccgtgttcgacctgcgccgggagcccaagatccccgcgccattcctgtggccgcaggaagaggcgcggccgtcctcggccgcggagctggaggtgccgatggtggacgtgggcgtgctgcgcaatggcgaccgcgcggggctgcggcgcgccgcggcgcaggtggccgcggcgtgcgcgacgcacgggttcttccaggtgtgcgggcacggcgtggacgcggcgctggggcgcgccgcgctggacggcgccagcgacttcttccggctgccgctcgccgagaagcagcgcgcccggcgcgtccccggcaccgtgtccgggtacacgagcgcgcacgccgaccggttcgcggccaagctcccctggaaggagaccctgtcgttcggctaccacgacggcgccgcgtcgcctgtcgtcgtggactacttcgtcggcaccctcggccaggatttcgagccaatggggtgggtgtaccagaggtactgcgaggagatgaaggagctgtcgctgacgatcatggagctgctggagctgagcctgggcgtggagctgcgcggctactaccgggagttcttcgaggacagccggtccatcatgcggtgcaactactacccgccgtgcccggagccggagcgcacgctgggcacgggcccgcactgcgaccccacggcgctcaccatcctcctgcaggacgacgtgggcgggctggaggtgctggtggacggtgagtggcgccccgtccggcccgtcccgggcgccatggtcatcaacatcggcgacaccttcatggcgctgtcgaacgggaggtacaagagctgcctgcaccgcgcggtggtgaaccagcggcgggcgcggcggtcgctggccttcttcctgtgcccgcgcgaggaccgggtggtgcgcccgccggccagtgctgcgccgcggcgctacccggacttcacctgggccgacctcatgcgcttcacgcagcgccactaccgcgccgacacccgcacgctggacgccttcacccgctggctctcccacggcccggcccaggcggcggcgcctccctgcacctag

SEQ ID NO: 423 - protein, 392 aa, Zea mays
MDASPAPPLLLRAPTPSPSIDLPAGKDKADAAASKAGAAVFDLRREPKIPAPFLWPQEEARPSSAAELEVPMVDVGVLRNGDRAGLRRAAAQVAAACATHGFFQVCGHGVDAALGRAALDGASDFFRLPLAEKQRARRVPGTVSGYTSAHADRFAAKLPWKETLSFGYHDGAASPVVVDYFVGTLGQDFEPMGWVYQRYCEEMKELSLTIMELLELSLGVELRGYYREFFEDSRSIMRCNYYPPCPEPERTLGTGPHCDPTALTILLQDDVGGLEVLVDGEWRPVRPVPGAMVINIGDTFMALSNGRYKSCLHRAVVNQRRARRSLAFFLCPREDRVVRPPASAAPRRYPDFTWADLMRFTQRHYRADTRTLDAFTRWLSHGPAQAAAPPCT

SEQ ID NO: 424 - DNA, 606 bp, Zea mays
atggcctcagcgaacaacgacaaccgcgaggcggcgggcatcctgcggctgctgatggggatggcagcggcggcggcgcccgcctcggcattgcctcggggcggcggcggcggcggcggcggcggcctgatgatggtgcagcacgtcatcctcgacgtcaacggggaactgttctcgggcggggtcggcggcggcggcgtgccgccggcgtcgaaggccgcgatcgccgcgctgaaggaggtgaaggccggggagggcgagggcgagggcgaggacgcgctgggcgagtgcgccatctgcctggacgcggtggagggcaccggcaaggagatgccgtgcgggcaccgcttccacgggcgctgcctggagcggtggctcggcgtgcacggcaactgccccgtctgccgccgcgagctgccagcgccggccaaggaggaggaggaggaggacagcgcggcgtccgcggagggcggcgaggaggacaggcggaggcccagggccgcggtcgtcgtcagctacctcgtgttcggaagcgggcgggcggaggcgcagcacgagccggagagggaggagccgtggaacattagaatagaggatgtggattag

SEQ ID NO: 425 - protein, 201 aa, Zea mays
MASANNDNREAAGILRLLMGMAAAAAPASALPRGGGGGGGGGLMMVQHVILDVNGELFSGGVGGGGVPPASKAAIAALKEVKAGEGEGEGEDALGECAICLDAVEGTGKEMPCGHRFHGRCLERWLGVHGNCPVCRRELPAPAKEEEEEDSAASAEGGEEDRRRPRAAVVVSYLVFGSGRAEAQHEPEREEPWNIRIEDVD

SEQ ID NO: 426 - DNA, 750 bp, Zea mays
atggcaatggcgtcgtcgtcgagcgggctgaggagctgcagcgcattgggcgtgcccagcctgctggcgccgtcgacgtcgtcgtcgtcccggtccggccgcctgccgttctgcgcccacgccaccacctccggccgcgtcaccatgtccgcggagtggatgcccgggcagccccgccccgcccacctcgacggctcctcgccaggtgacttcggcttcgaccccctgggcctggccacggtgccggagaacttcgagcggttcaaggagtcggaggtgtaccactgccggtgggccatgctggccgtgccgggggtgctggtgccggaggcgctggggctgggcaactgggtgaaggcgcaggagtgggcggccgtccccggcgggcaggccacgtacctgggcgccccggtgccgtggggcacgctgccgaccatcctggcggtcgagttcgtggccatcgccttcgccgagcaccagcgcaccatggagaaggaccccgagaagaagaagtaccccggcggcgccttcgacccgctcggcttctccagggaccccgccaagctcgaggagtacaagctcaaggagatcaagaacggccgcctcgccatgctggccttcgtcggcttctgcgtccagcagtcggcgtacccgggcaccggtccgctcgagaaccttgccgcccacctcgccgacccctggcacaacaacatcggagacatcatcatccctagatcgatctccccttga

SEQ ID NO: 427 - protein, 249 aa, Zea mays
MAMASSSSGLRSCSALGVPSLLAPSTSSSSRSGRLPFCAHATTSGRVTMSAEWMPGQPRPAHLDGSSPGDFGFDPLGLATVPENFERFKESEVYHCRWAMLAVPGVLVPEALGLGNWVKAQEWAAVPGGQATYLGAPVPWGTLPTILAVEFVAIAFAEHQRTMEKDPEKKKYPGGAFDPLGFSRDPAKLEEYKLKEIKNGRLAMLAFVGFCVQQSAYPGTGPLENLAAHLADPWHNNIGDIIIPRSISP

SEQ ID NO: 428 - DNA, 756 bp, Zea mays
atggcgctgaacggcggcaagacgacgttggtgcaggacgaggagaagcagcagcttctgctggagaagcacaccgagaagcacttcaccgcgggcgaggtggtccgggacatcatcatcggcgtctccgacggcctcaccgtgcccttcgcgctcgccgcggggctgtccggcgccaacgcctcctccgcgctcgtgctcaccgcggggctcgccgaggtcgccgccggcgccatctccatggggctcggagggtacctggcggcgaagagcgaggctgaccactacaaccgggagctgcagcgcgagcaggacgagatcgacaccgtccccgacgtcgaggccgccgagatcgccgacatcctgtcgcagtacgggctgggcccggaggagtacggccccgtggtgacctccctccgcaacaaccccaaggcgtggctggagttcatgatgaagttcgagctcgggctggagaggcctgagccccggcgcgcgctggtgagcgccgccaccatcgcgctgtcctacgtcgcgggcgggctggtgccgctgctcccctacatgttcgtgccggaggccgcgcgcgccatggccgtgtccgtcgccgtgacgctcgcggcgctgctcttcttcggcttcgtcaagggccgcttcacgggcgaccgccccttcttcagcgccgtccagaccaccgtcgtcggcgcgctcgcctccgccgccgccttcgccatggccagggccgtgcagtccatatga

SEQ ID NO: 429 - protein, 251 aa, Zea mays
MALNGGKTTLVQDEEKQQLLLEKHTEKHFTAGEVVRDIIIGVSDGLTVPFALAAGLSGANASSALVLTAGLAEVAAGAISMGLGGYLAAKSEADHYNRELQREQDEIDTVPDVEAAEIADILSQYGLGPEEYGPVVTSLRNNPKAWLEFMMKFELGLERPEPRRALVSAATIALSYVAGGLVPLLPYMFVPEAARAMAVSVAVTLAALLFFGFVKGRFTGDRPFFSAVQTTVVGALASAAAFAMARAVQSI

SEQ ID NO: 430 - DNA, 2010 bp, Zea mays
atggcgctgctctccgccacttcacccgccaaggcgcacctgccgacgctcctcgcctaccacgacgagccgcagcagcaccagcacgctctcccgcctgcacacccgcagtgcttcggcggcggcgggggcaaggccaggcaacgggcgcggggccggtgcgcggcggcaatgcggcctctggacgcggccgtcgctcccgctcccacgcccgcggccggtgaggcgccgcggaagaagccccgggtgctggtggccggcggcggcatcggcggactcgtgctcgcgctggcggcgcgacgcaaggggtacgacgtgacggtgttcgagcgcgacatgagcgcggtgcgcggggagggccagtaccgcggacccatccagatccagagcaacgcgctggccgcgctggaggccatcgacatgtccgtcgccgaggaggtcatgcgcgtcggctgcgtcaccggcgaccgcatcaatggcctcgtcgatggcatgtccggctcctggtacatcaagtttgatacgtttactcctgcagctgagcgggggctcccagtcacaagggtcattagccgcatgacactgcaacaaatccttgctcgagcagtcggcgatgacgcaatattgaatggaagccatgtagtcgattttacagatgatggcagtaaggttactgccatattggaggacggtagaaaatttgaaggtgaccttttggttggcgccgatggaatatggtcaaaggtgaggaagacactattcgggcactcagatgccacctattcaggttacacctgctacactggaattgcagattttgtgccacctgatatcgatacagttgggtaccgagtatttctgggccacaaacagtacttcgtctcttcggatgtcggtgccggtaaaatgcaatggtacgcttttcacaaggaagaggctggtggcactgaccctgaaaacggcaaaaagaaaaaattgcttgagatattcgacggatggtgtgataatgtcatcgatttgataaacgcaaccgacgaagaagcaattcttcgccgagatatatacgaccgcccacctactataaattgggggaaaggtcgtgtcaccttgctcggcgattctgtccatgctatgcagccaaatctgggccaaggtggctgcatggctattgaggatggttaccagctggccgtagaactagagaatgcctggcaagagagtgtcaaaactgaaactcctatagacatagtttcctccttgagacgctacgagaaagagagaaggctgcgtgttgctattatacatggactggcaagaatggcagcaatcatggctaccacctatagaccgtacttgggtgttggtctagggcctttatcgtttttgaccaagttgcggataccacaccctggaagagtcggtggcagattcttcatcaagtatggaatgcctacgatgctgagctgggtgcttggtggcaacagctcaaaactagaaggaagacttttaagctgccgactttctgacaaggcaaatgaccagctttatcaatggtttgaggatgatgacgcactggaagaagctatgggtggagaatggtacctcatcgcaacaagtgaaggaaactgcaatagcttgcagcccattcatttaaatagggaagaagagaggtcactagcagctgaaagccggccaaaacagaatgacccagcttcatccctatcattgccctctccacagatatcagaaagacatgctactatcacatgcaagaataaagctttctatctgactgatctcggaagcgaacatggtacctggattaccgacaatgaaggtagacgttaccgcgtgccaccaaacttcccagttcgtttccatccctccgatgtcattgagtttggttccgataagaaggctatgttccgggtgaaggtgctgaacacgctcccatacgaatcagcaagaagtgggaatcggcagcaacagcaagtccttcaggcagcatga

SEQ ID NO: 431 - protein, 669 aa, Zea mays
MALLSATSPAKAHLPTLLAYHDEPQQHQHALPPAHPQCFGGGGGKARQRARGRCAAAMRPLDAAVAPAPTPAAGEAPRKKPRVLVAGGGIGGLVLALAARRKGYDVTVFERDMSAVRGEGQYRGPIQIQSNALAALEAIDMSVAEEVMRVGCVTGDRINGLVDGMSGSWYIKFDTFTPAAERGLPVTRVISRMTLQQILARAVGDDAILNGSHVVDFTDDGSKVTAILEDGRKFEGDLLVGADGIWSKVRKTLFGHSDATYSGYTCYTGIADFVPPDIDTVGYRVFLGHKQYFVSSDVGAGKMQWYAFHKEEAGGTDPENGKKKKLLEIFDGWCDNVIDLINATDEEAILRRDIYDRPPTINWGKGRVTLLGDSVHAMQPNLGQGGCMAIEDGYQLAVELENAWQESVKTETPIDIVSSLRRYEKERRLRVAIIHGLARMAAIMATTYRPYLGVGLGPLSFLTKLRIPHPGRVGGRFFIKYGMPTMLSWVLGGNSSKLEGRLLSCRLSDKANDQLYQWFEDDDALEEAMGGEWYLIATSEGNCNSLQPIHLNREEERSLAAESRPKQNDPASSLSLPSPQISERHATITCKNKAFYLTDLGSEHGTWITDNEGRRYRVPPNFPVRFHPSDVIEFGSDKKAMFRVKVLNTLPYESARSGNRQQQQVLQAA

SEQ ID NO: 432 - DNA, 1536 bp, Zea mays
atggccttcttcttggccctcgtgtgcatcctcatcttgctagccatcgcctcctacgtccagtacactcgctggcaaaaggggaaaggccgcttcggcggccatgggaggtctgctcccttgaagctgcctcctggctccatgggctggccttaccttggcgagaccctccagctttactcccaggaccccagcttcttcttcgcttccaaacagaagaggtacggcgagatcttcaagacgcaccttctgggttgcccgtgcgtgatgctggcgagcccggaggcggcgcggttcgtgctggtgacgcaggcgcacctgttcaagccgacctacccgcggagcaaggagcgcatgatcgggccgtcggctctcttcttccaccagggcgactaccacctccgcctccgcaagctcgtccagggcgcgctcggccccgacgcgctgcgcgcgctcgttcctgaggtggaggccgccgtgcggtccactctcgcttcctgggacgccggccacgtcagaagcacgttccacgccatgaagacgctgtcgtttgatgtgggcatcgtgacgatcttcggcggccggctggacgagcggcgcaaggcggagctgaggaagaattactccgtcgtggagaaggggtacaactccttccccaacagcctgccggggacgctccattacaaggcgatgcaggcgcggcggcggctgcacggcgtgctgtgcgacatcatgcgggagcgtcgtggccaggcccaggcggcgggcaccggcctgctgggctgcctgatgcggtcccggggcgacgacggcgcgccgctcctgagcgacgagcagatcgccgacaacgtcatcggcgtgctgttcgcggcgcaggacacgacggccagcgcgctcacctggatcgtcaagtacctccacgaccaccccaagctgctcgaggccgtccgggcggagcaggcggcggtccgcgaggccaccggcggcgggaggcagccgctggcgtgggcgcacacgaagagcatggcgctaacgcatagggtgattttggagagcttaaggatggcgagcatcatctcgttcacgttcagggaggccgtggccgacgtggagtacaaagggttccttatccccaaggggtggaaggtgatgccgctcttcaggaacatccaccacagcccggactacttccaggatccacacaagttcgacccttctagattccaggtggcgccgcgtccgagcacgttcctgccgtttgggcacggcgtgcacgcgtgccccgggaacgagctggccaagctcgagatgctcgtcctcatccaccacctggtcaccggctacaggtggcaaatcgttggatccagtgacgaggtcgagtacagcccgttccctgtgcccaagcacggcttgcctgtcagattatggagacaaaacaatccggtcgacagaaaggtgagaccgacgacgatcatgtggagaggatatttatttagtttgactcttgagttaggcatgaatttaaccccaagctag

SEQ ID NO: 433 - protein, 511 aa, Zea mays
MAFFLALVCILILLAIASYVQYTRWQKGKGRFGGHGRSAPLKLPPGSMGWPYLGETLQLYSQDPSFFFASKQKRYGEIFKTHLLGCPCVMLASPEAARFVLVTQAHLFKPTYPRSKERMIGPSALFFHQGDYHLRLRKLVQGALGPDALRALVPEVEAAVRSTLASWDAGHVRSTFHAMKTLSFDVGIVTIFGGRLDERRKAELRKNYSVVEKGYNSFPNSLPGTLHYKAMQARRRLHGVLCDIMRERRGQAQAAGTGLLGCLMRSRGDDGAPLLSDEQIADNVIGVLFAAQDTTASALTWIVKYLHDHPKLLEAVRAEQAAVREATGGGRQPLAWAHTKSMALTHRVILESLRMASIISFTFREAVADVEYKGFLIPKGWKVMPLFRNIHHSPDYFQDPHKFDPSRFQVAPRPSTFLPFGHGVHACPGNELAKLEMLVLIHHLVTGYRWQIVGSSDEVEYSPFPVPKHGLPVRLWRQNNPVDRKVRPTTIMWRGYLFSLTLELGMNLTPS

SEQ ID NO: 434 - DNA, 1164 bp, Zea mays
atgtggtcgtggttgacgaagattgcgtccgcgtgcttgggcccggtccggaggtgcgcgcgtacgaggaaggatgaggacgacagcgataatggccgcggcgtcgccgacgacctgctgtggtcgcgggacctcgggcgccacgcggcgggtcagttctcgtttgccgtcgtgcaggccaacgaggcgttggaggaccacagccaagtggagacaggctctgccgcaactttcgtaggcgtctacgacggtcatggcggcgctgaggctgcccgcttcatatctgaccacctcttcgcacacctcattcgacttgctcaggaaaatggaacaatatctgaggatgttgttcggagtgcgttttctgccaccgaggaaggcttcttgacactcgtgcggagaacacgttttataaagcctttgattgctgcggttggatcctgctgtctagttggtgtcatatggagagggacactatatgtggctaatctaggcgattccagggctgttattggcgttctaggtagatcaaacaagatcgtggctgagccactcacaagagatcataatgcaagtagggaggaggtcaggcaggagcttatatcccgtcatccagatgattctcaaattgtcgttctcaagcatggtgtttggcgcatcaagggcataattcaggtttcaagaacaattggagatgcttacttgaaggggcgggaatttgctcttgatccatctatcactcgtttccgcctttcggagcctctccgccagcctattctcacagcagagccatctatctatacaagggtgcttaacccacaagataaatttattatttttgcatctgatggtctttgggagcacttgacaaatcaacaggccgttgaaattgtccacagcaatccacgatcaggaattgcaaagaggctggtaagggcagcgttgaaacaagctgcacggaagagggaaatgaggtatgatgacctcaggaaagttgagaagggaattcgccgcttcttccacgatgacattacagtagttgttgtttacatagatcacggattactgcaagagagggatacttccgtgccagagctctcagtccgtggctttgttgactccgttggcccctcaagtttctcagggataaccgccatatcatga

SEQ ID NO: 435 - protein, 387 aa, Zea mays
MWSWLTKIASACLGPVRRCARTRKDEDDSDNGRGVADDLLWSRDLGRHAAGQFSFAVVQANEALEDHSQVETGSAATFVGVYDGHGGAEAARFISDHLFAHLIRLAQENGTISEDVVRSAFSATEEGFLTLVRRTRFIKPLIAAVGSCCLVGVIWRGTLYVANLGDSRAVIGVLGRSNKIVAEPLTRDHNASREEVRQELISRHPDDSQIVVLKHGVWRIKGIIQVSRTIGDAYLKGREFALDPSITRFRLSEPLRQPILTAEPSIYTRVLNPQDKFIIFASDGLWEHLTNQQAVEIVHSNPRSGIAKRLVRAALKQAARKREMRYDDLRKVEKGIRRFFHDDITVVVVYIDHGLLQERDTSVPELSVRGFVDSVGPSSFSGITAIS

SEQ ID NO: 436 - DNA, 933 bp, Zea mays
atgacggccgggcagcttctgcgcaccgagccatcagcccagccccagcgggtgcgccacagcaccccgccggcggcactccaagcagacatcgtgccgtcgtacccgccgcccgagtcggacggtgacgagtcgtgggtctggtcccagatcaaggcggaggcgcggcgcgacgcggacgcggagccggcgctggcctccttcctctacgcgacggtgctgtcgcacgcgtccctggaccggtccctggccttccacctggccaacaagctgtgctcctccacgctgctgtcgacgctcctctacgacctcttcgtggcgtcgctcgcggagcacccgtccgtccgcgcggcggcggtggccgacctgatcgccgcgcggtcgcgggacccggcctgcgcgggcttcgcgcactgcctcctcaactacaaggggttcctggccgtgcaggcgcaccgcgtggcgcacgtgctgtgggcgcagggccggcgcgcgctggcgctggcgctccagtcccgcgtcgccgaggtcttcgccgtggacatccacccggccgccaccgtcggcaggggcatcctgctcgaccacgccacgggcgtcgtcgtcggggagacggccgtcgtgggcgacaacgtctccatactccaccacgtgacgctgggcggcaccggcaaggcggtgggcgaccggcaccccaagatcggggacggcgtgctcatcggcgccggcgcgaccgtcctcggaaacgtcaggatcggcgccggcgccaaggtcggcgccgggtccgtcgtgctcatcgacgtgccgcccaggagcaccgccgtggggaaccccgccaggctgatcggcgggaagaagggcgaggaggtgatgccgggggagtccatggaccacacctccttcatacagcagtggtcggactacatcatttga

SEQ ID NO: 437 - protein, 310 aa, Zea mays
MTAGQLLRTEPSAQPQRVRHSTPPAALQADIVPSYPPPESDGDESWVWSQIKAEARRDADAEPALASFLYATVLSHASLDRSLAFHLANKLCSSTLLSTLLYDLFVASLAEHPSVRAAAVADLIAARSRDPACAGFAHCLLNYKGFLAVQAHRVAHVLWAQGRRALALALQSRVAEVFAVDIHPAATVGRGILLDHATGVVVGETAVVGDNVSILHHVTLGGTGKAVGDRHPKIGDGVLIGAGATVLGNVRIGAGAKVGAGSVVLIDVPPRSTAVGNPARLIGGKKGEEVMPGESMDHTSFIQQWSDYII

SEQ ID NO: 438 - DNA, 483 bp, Zea mays
atgctgctcctgctggggctcgtcggctggctcgtgcccacggggaatggagccggtccggcggcgcagcagcagcagcagcagggccaggctgctgccgatcctggggcgcggcggctggtggtgcaccaccggtgcgcgtgcgggctaacggacgccgctatcgccgcgctgccggcggcgttcacgtactacgaggcgcccgcggtgaagaatggagtggggagcgaggacgacaagcagccgcgcggcagctccttgctgtgcgcggtttgcctggacgacgtgcggggcggcgagatggtgcggcagctgccggcgtgccgccacctgtttcacgtcgactgcgtcgacgcctggttgcgcgctcaccggacgtgcccgctctgccgctgccagctctccccgaggaacgacgtcagcacaaagcgggccgccgcggtcgtcggggagtcatccatcgacgcgttgccgccggtgtga

SEQ ID NO: 439 - protein, 160 aa, Zea mays
MLLLLGLVGWLVPTGNGAGPAAQQQQQQGQAAADPGARRLVVHHRCACGLTDAAIAALPAAFTYYEAPAVKNGVGSEDDKQPRGSSLLCAVCLDDVRGGEMVRQLPACRHLFHVDCVDAWLRAHRTCPLCRCQLSPRNDVSTKRAAAVVGESSIDALPPV

SEQ ID NO: 440 - DNA, 1002 bp, Zea mays
atgatcagcacagcgcacagccggcagcagcaccatgccttcgagaagagccctggcaacagccacatgaagagcatcgacaggaagctgcagcaggccatgagccaggcggccagcaagtacatgcagaggatctaccctctaggcatgcagaggagcagctccagcctcacattgtcgtcgctctcgctgtcgcagaactccaacgactcctccatcagcagctccaactccagctgggagcccaaggtgccgctgctctacggcggcaccttcagcccatggggcgacgtcatggtgtctcgggagatgaggcgggaggacgatgacaaggtcagtgaccatgacgtcgaaggaggcgaggaggacttggactgcagtgagccggggagcctgcgtaggtgcagctggatcaccaagaacagtgacgaggcgtacgtccagttccacgacgagtgctggggcgtccctgtgtacagcgacaaccggctgttcgagcttctgtcgctgtcagggatgctgatcgaccacaactggacggagatactgaagcggcgggacatgtacagggaggcgttcgccgacttcgaccccagcgcggtggcgcggatggaggaggaggacgtggcggagatcagcggcgacagggagctgaggatcgccgagtgcagggtccggtgcatcgtggagaacgccaggtgcatccagagggtggccagggagttcggctccttcagcggctacatgtggggccacgtgaaccaccggccggtggtgggcaagtaccgccaccacaagtacatcccgttccggacgcccaagtcggaggcggtgagcaaggacctcgtccgccggggcttccgcctcgtcggccccgtcatcgtctactctttcatgcaggccgccggcatggccatcgaccacctcgtcgactgcttccgcttccacgactgcgtccgcctcgccgagcgctcctggggcatcaccaacgtcgccgcgtag

SEQ ID NO: 441 - protein, 333 aa, Zea mays
MISTAHSRQQHHAFEKSPGNSHMKSIDRKLQQAMSQAASKYMQRIYPLGMQRSSSSLTLSSLSLSQNSNDSSISSSNSSWEPKVPLLYGGTFSPWGDVMVSREMRREDDDKVSDHDVEGGEEDLDCSEPGSLRRCSWITKNSDEAYVQFHDECWGVPVYSDNRLFELLSLSGMLIDHNWTEILKRRDMYREAFADFDPSAVARMEEEDVAEISGDRELRIAECRVRCIVENARCIQRVAREFGSFSGYMWGHVNHRPVVGKYRHHKYIPFRTPKSEAVSKDLVRRGFRLVGPVIVYSFMQAAGMAIDHLVDCFRFHDCVRLAERSWGITNVAA

SEQ ID NO: 442 - DNA, 1008 bp, Zea mays
atgggaactgcaagagttcgcttcgtggtccttgttctgatctctacgtttctcagagtcagagaaggcagagccgcgacattcacgttcgtgaaccggtgcacggggacggtgtggccgggcatccagtccaacgccggaagctcgaggctggacacgacgggcttcgtgctgccgccgggcacgtcgcgcgcggtcccggcgccgtcggggtggtccggccgcgtctgggcccgcaccggctgcgggcaggacggcagcggcaaggtggtgtgcgcgacgggcgactgcgggtccgggtccctggagtgcaacgggcagaacgcggcgacgcctgcgacgctggccgagttcacgctggcctccgcgggcggcaacgacttctacgacgtgagcctggtggacggctacaacctgccgatcctggtggagcccgcgggcggcgccgccaccggcgccagtgccacgacgtgcgccgcggccgggtgcacggcggacctcaacgagcggtgccccgcggagctgcgcgccgagggcggcgccgggtgccgcagcgcctgcgacgccttcggcaggcccgagtactgctgcagcggcgcctacgccaaccccaacacctgccgccccaccgcctactcgcagctcttcaagtccgcctgccccaactcgtacagctacgcatacgacgaccccaccagcaccttcacctgcgccggcggccgcgactacaccatcaccttctgccccgtcgccaccccaagcgtgaaatcgtcgagtggccctggagcggcaacaacgacggcggcaccgacaggcccgacgccgacgctgccgggggcgacgccgcggtcggcaggcggcggcccggaggggcagggcgtgatgctgggcgacaactcctggctcgccagcctcgccacgggcgacgcgtcgtccgcgccggcgctccgggccttgcccctcgcgccgctcctgctcgtcggcctgctcctgcttgtgctgctatag

SEQ ID NO: 443 - protein, 335 aa, Zea mays
MGTARVRFVVLVLISTFLRVREGRAATFTFVNRCTGTVWPGIQSNAGSSRLDTTGFVLPPGTSRAVPAPSGWSGRVWARTGCGQDGSGKVVCATGDCGSGSLECNGQNAATPATLAEFTLASAGGNDFYDVSLVDGYNLPILVEPAGGAATGASATTCAAAGCTADLNERCPAELRAEGGAGCRSACDAFGRPEYCCSGAYANPNTCRPTAYSQLFKSACPNSYSYAYDDPTSTFTCAGGRDYTITFCPVATPSVKSSSGPGAATTTAAPTGPTPTLPGATPRSAGGGPEGQGVMLGDNSWLASLATGDASSAPALRALPLAPLLLVGLLLLVLL

SEQ ID NO: 444 - DNA, 468 bp, Zea mays
atggaggctccgctcctcctaccaatctccaccgcctcatcctgcatcgagatcgccgagggcgccgtgccatcgggccctcgtgctcgctcgtcctcgtccatgccttcggcccagagcttcgtcctccgcgtggtgaccgtggtcgccgtggcgtgcgcgtccctgttcgcgcagcacgaggccggcaaaagcttcgccgtgtccgtcgcgaacgacctgccgcggggcagcgccgcggcgcggcgcttcgacctcctcctggtgtccaacggccgcgccgagcgcgcgctcctgcgcgccagccgcgccgtggagcgcgcgctgttcccggacccgtcgttcccgccccggcgcgcgtcaccgagtccatggttgactacctcgcctccgccgcggccgaggtcgaggtcgaggtcgaggcgcctccatcggctgccgggtgcggcatgtcggcgcggctcctga

SEQ ID NO: 445 - protein, 155 aa, Zea mays
MEAPLLLPISTASSCIEIAEGAVPSGPRARSSSSMPSAQSFVLRVVTVVAVACASLFAQHEAGKSFAVSVANDLPRGSAAARRFDLLLVSNGRAERALLRASRAVERALFPDPSFPPRRASPSPWLTTSPPPRPRSRSRSRRLHRLPGAACRRGS

SEQ ID NO: 446 - DNA, 1011 bp, Zea mays
atggcaagcaggcaaggtgtagccgcctccatgttcgccacggcattgctcctcggcgtctttgcatccatcccacaaagtgctgaggccatcggggtgtgctacggcatgagcgccaacaacctgccggcggcgagcacggtggtgagcatgtacaaggcgaacggcatctcggcgatgcggctgtacgcgccggaccagggcgcgctgcaggcggtgggcggcacgggcatcagcgtggccgtgggcgcccccaacgacgtgctgtccaacatcgcggctagccccgcggcggccgcgtcgtgggtgcgcaacaacatccaggcgtacccgtccgtgtcgttccgctacgtgtgcgtgggcaacgaggtggccggcggcgcggcgcaggacctggcgccggccatggagaacgtgcacgcggcgctggcggcggccgggctgggccacatcaaggtgacgacgtcggtgtcgcaggccatcctgggcgtgtacagcccgccgtccgccgcggagttcaccggcgaggcgcgcgggtacatgggccccgtgctgcagttcctggcccgcaccgggtcgccgctcatggccaacatctacccgtacctggcctgggcatacaaccccagcgccatggacatgagctacgcgctcttcacctcctccggcaccgtcgtgcaggacggcgcctacgggtaccagaacctcttcgacaccaccgtcgacgccttctacgtcgccatgggcaagaacggcggctccggcgtgccgctcgtggtgtcggagagcgggtggccgtccggcggcggcgtccaggccacgccggccaacgcgagggtgtacaaccagtacctcatcaaccacgtcgggcgcgggacgccgcgccaccccggcgccatcgagacctacctcttctccatgttcaacgagaaccagaaggagagcggcgtggagcagaactgggggctcttctaccccaacatgcagcacgtctaccccatcagcttctga

SEQ ID NO: 447 - protein, 336 aa, Zea mays
MASRQGVAASMFATALLLGVFASIPQSAEAIGVCYGMSANNLPAASTVVSMYKANGISAMRLYAPDQGALQAVGGTGISVAVGAPNDVLSNIAASPAAAASWVRNNIQAYPSVSFRYVCVGNEVAGGAAQDLAPAMENVHAALAAAGLGHIKVTTSVSQAILGVYSPPSAAEFTGEARGYMGPVLQFLARTGSPLMANIYPYLAWAYNPSAMDMSYALFTSSGTVVQDGAYGYQNLFDTTVDAFYVAMGKNGGSGVPLVVSESGWPSGGGVQATPANARVYNQYLINHVGRGTPRHPGAIETYLFSMFNENQKESGVEQNWGLFYPNMQHVYPISF

SEQ ID NO: 448 - DNA, 720 bp, Zea mays
atggctcagtctcaacagatggcgagcaagaaacctcctggccttaggctattcggaggttccggttcgctgagaacctaccagacgctagtcctggtcctcacattcttcgcatacgcatgcttccacatgactcggaagatcacgagcatcgtcaagagcgcgctggacccccagacgaagatggggttctcccactggggacggctgcacctgcacacgagcgaggctccggctcttaacactggctggctgccgttcaacaccgctgacggctcagcgttgctcggcgagatagacgtcgcgttcctcgctgcgtattccatcgggatgttcttcgccggacacatcggggaccgcatagatctaaggatctttctgacgatcggcatggtcgggactgccgtgttcacggctctcttcggcgctggatactggctgaacgtccacagcttctactatttcctggtcgttcagatggtttccggcctgtttcagtcggttgggtggccgtcggttgtcgcggttgtcggtaactggttcgggaagagcaagagggggctgatcatgggcgtatggaacgcgcacacttctatcgggaacatagctggctcgctgcttgccgccttcctcctcgagttcgggggggctggtcgttcgccgtccctagccttgtcatggctcttgttgggttggtgggtatgtttccctgccggttag

SEQ ID NO: 449 - protein, 239 aa, Zea mays
MAQSQQMASKKPPGLRLFGGSGSLRTYQTLVLVLTFFAYACFHMTRKITSIVKSALDPQTKMGFSHWGRLHLHTSEAPALNTGWLPFNTADGSALLGEIDVAFLAAYSIGMFFAGHIGDRIDLRIFLTIGMVGTAVFTALFGAGYWLNVHSFYYFLVVQMVSGLFQSVGWPSVVAVVGNWFGKSKRGLIMGVWNAHTSIGNIAGSLLAAFLLEFGGAGRSPSLALSWLLLGWWVCFPAG

SEQ ID NO: 450 - DNA, 708 bp, Zea mays
atgcgcaagtttcaggactccatcaaggccctccaggccgacatcgatcatgccaatgcgatggtgtcggaattcttgagggactacgatggctcggtcatccagatgcgggtggcgtacagcgccgtcgcgcatttcctcctgcagtggaccgactgcaagctcgccggcgcgctcggcctcctcaaggttatgctatacaaggtgtgcgcggacggctcgtcggcgcttcctgattgggagatggaggccagcatcagggagttttacggcgtcattttcccgtcgctgctgcagcttccgagtggcatcaccgagctggacgacaggaagcagaggaagctctgccttaagaaattcaggagcagggatgagcagctctcggaggtggacacggagagggagctcgagtgcgggatctgcctcgaggttagccccaaggtcgtgctgcccgactgtgcccacatgctttgcatgcggtgttttgaggattggaacgcgaaatcgaagtcctgccccttttgtcgcgcctgcctggaggaggtgaagccgggcagcctgtggatatacaccgacgacagcgacgtggtggacatggataccttgactagggagaacatcaggcggctgttcatgtacataaataagctgccacttgtagtcctacatgtagttgaccttgacgtttacaagtaccgcatcaagtaa

SEQ ID NO: 451 - protein, 235 aa, Zea mays
MRKFQDSIKALQADIDHANAMVSEFLRDYDGSVIQMRVAYSAVAHFLLQWTDCKLAGALGLLKVMLYKVCADGSSALPDWEMEASIREFYGVIFPSLLQLPSGITELDDRKQRKLCLKKFRSRDEQLSEVDTERELECGICLEVSPKVVLPDCAHMLCMRCFEDWNAKSKSCPFCRACLEEVKPGSLWIYTDDSDVVDMDTLTRENIRRLFMYINKLPLVVLHVVDLDVYKYRIK

SEQ ID NO: 452 - DNA, 1440 bp, Zea mays
atgaaggtcgacagggagatggagattctgctgaacgagatccccctcctccaccacgtcggcctcctcggcggcagcgaggccggcgcggacgacgacgccgacctctccttcctcatccacgagctcgccgcgatgggcctcgtcgacggcgacgacgagctgccggcgccgggcgctgccaccggctacggcttccccacgaaaggcgagaaccttgtcgccatgcactcgttctccatggccagccactacgcgcacatgcgctctctgtttgttcccgtcaccttcgacgacgccgccgcggccgacggctgggacatccggtgctccccgccgccttatgtgcctctgccttctcccgccacgccgagggcccggtgcaagagcgtgaggaggaagaacggctcggtgatgacgacgagccccaagaagtgcggagccgccgcggcggccaagtggcacggcgagagcctggccggcctgcgcggggtcatgtaccacatggcgcgcgaccagcacgggtgccgcctgctgcagcagaggctcgacgacggcaagcgcgaggtcgactatatcttcgccggcgtctcgcgccacgccgcgcagctgatggtggacccgttcgggaactacctcatgcagaagctgctcgccgtctgcgacgacgggcagaggatgacgcttgtgctcaccctcaccgccgaccccttcgcgctcgtcaggatatccctcaacgtccatggaacacgggcggtgcagaagctgatcgagagactcagtgcaagggaagagattggtcttgtcatggatgctctgcgccctggcttcttggagctcatcaaggataccaatggcaaccatgtcgtgcaaaagtgtttgcattcgtttgcttcaaacgataataaggcgatctttgctgctgctgcactccactgcgtcgatatcgggatgcaaatccacggttgctgtgtcctacagcggtgcattgcgcggtcgcgtggtgagcacagggacaagctggttgccgccattgctcacaatgggtttaagcttgccgaagatgcatatgggaactacgttgtccaggttgtactggacttgaagataccaactgcgaattcaagccttgcgcaacagtttggaggcaagtatatccacctgtccatgcagaagttcagcagcaatgttgtggagaaatgcctgaaagtgttcaaggaggttgacaaggccaagatcatattggaaatccttgccacgccacacctggagcaactgcttccgcactgctatgcaaactatgtcgtctactctgctctcaagaattcaaagggctcacttcattccgcactgataaatgcaatcctaccacatgaggaactacttaggaccagtccgtactgcaagaggatatactcgaaattttttctgaagaattga

SEQ ID NO: 453 - protein, 479 aa, Zea mays
MKVDREMEILLNEIPLLHHVGLLGGSEAGADDDADLSFLIHELAAMGLVDGDDELPAPGAATGYGFPTKGENLVAMHSFSMASHYAHMRSLFVPVTFDDAAAADGWDIRCSPPPYVPLPSPATPRARCKSVRRKNGSVMTTSPKKCGAAAAAKWHGESLAGLRGVMYHMARDQHGCRLLQQRLDDGKREVDYIFAGVSRHAAQLMVDPFGNYLMQKLLAVCDDGQRMTLVLTLTADPFALVRISLNVHGTRAVQKLIERLSAREEIGLVMDALRPGFLELIKDTNGNHVVQKCLHSFASNDNKAIFAAAALHCVDIGMQIHGCCVLQRCIARSRGEHRDKLVAAIAHNGFKLAEDAYGNYVVQVVLDLKIPTANSSLAQQFGGKYIHLSMQKFSSNVVEKCLKVFKEVDKAKIILEILATPHLEQLLPHCYANYVVYSALKNSKGSLHSALINAILPHEELLRTSPYCKRIYSKFFLKN

SEQ ID NO: 454 - DNA, 660 bp, Zea mays
atgggcgaggaggcggtggacgactacgagctccacatggtgtgctacggcagcgacgaggacgagcgcgtgatggagtgggagtcggggctccctggcgccgacgagctgaccccgctctcgcagccgctggtgccgccggggctggccgcggcgttccgcatcccgccggagcccgggcgcaccctgctggacctgcaccgagcgtccgaagccacggtggcgcggctgcggcgcgcgccgccgtcgtcgccgggcacctcctcctccccccacggccaccaggaggcgagggggggcgaaggggcggactcggcggcggcgactaccacgaacagcaacagacggccccggctggtttggacgccgcagctgcacaagcggttcgtggacgtggtggcgcacctggggatcaagaaggcggtgcccaagaccatcatggagctgatgaacgtggaaggtctgacgcgggagaacgtggccagccacctgcagaagtaccggttgtacgtgaagcggatgcgggggcagggtccgtccccgtccgaccacatcttcgcacccacaccggtgcacggcgtcgccgtcggcatggtgcccatggtcagcggccaggcgtaccactacctgtacaacggaggagggggaggagacagatga

SEQ ID NO: 455 - protein, 219 aa, Zea mays
MGEEAVDDYELHMVCYGSDEDERVMEWESGLPGADELTPLSQPLVPPGLAAAFRIPPEPGRTLLDLHRASEATVARLRRAPPSSPGTSSSPHGHQEARGGEGADSAAATTTNSNRRPRLVWTPQLHKRFVDVVAHLGIKKAVPKTIMELMNVEGLTRENVASHLQKYRLYVKRMRGQGPSPSDHIFAPTPVHGVAVGMVPMVSGQAYHYLYNGGGGGDR

SEQ ID NO: 456 - DNA, 588 bp, Zea mays
atgggggatgtgtccttgaatggacccgttaaggccgagccaactgccggtggcattgccaagggaaaccgagttctggacacgatgtccgccgggtggacggacgagagacacatgctgtatataagctccatggaggcttctttcgtcgaccagctatacaaccatggaaaccatccgcaccacgcaaatggcgccggcttcaaggttctccgcaggggggtgtgggagtacatcaagtatgagaagaccagtgcccctgtgcgaagtggggctaaatgctgcgtccctgcaaatccttggatccggcatttcaggccacgtgactgcggtagtaacgcacagagtgacgcggtcgaggcctcagtgggcgaccatgagtcgggtactcaggcaagccgcaagagcccttcagtgtctcatggaagggaacgggaagcttgtaagggagaaccccagattctacatgaaagtacagaggtctctgatcaaaattttgctgacgatgaggctgaagctgaaacagaatcaatgaaagcatgcaagaaaaggagactaagcagggcttcgcgctactgtgctgaatga

SEQ ID NO: 457 - protein, 195 aa, Zea mays
MGDVSLNGPVKAEPTAGGIAKGNRVLDTMSAGWTDERHMLYISSMEASFVDQLYNHGNHPHHANGAGFKVLRRGVWEYIKYEKTSAPVRSGAKCCVPANPWIRHFRPRDCGSNAQSDAVEASVGDHESGTQASRKSPSVSHGREREACKGEPQILHESTEVSDQNFADDEAEAETESMKACKKRRLSRASRYCAE

SEQ ID NO: 458 - DNA, 438 bp, Zea mays
atgggcgcgcgccggaagctcgacggcggccatgagaacgagcagaggaactccggcatccatggtaaggagggtttcaccatggccgagcagacagggagtgccgtgagcagagaagtttcgcgcgctcggctggacgcaggagaacacgcgcgcagggacgagctcggctgggctagagcagggaagaccgcggctggggaaaggaggagcagggaggtcgcggccagagagatgggcgccatgggcgagttgcacagccggcgagctggaactgagcgccgtggaggagcaggaggtgggacagcgctagggagggagatggacttggcaagcaggaagccaagcgctggcgagttggaggacgggagggcgctcggccatggggagcaagatggagggagctcggtgggctggggatggacaccagagagatga

SEQ ID NO: 459 - protein, 145 aa, Zea mays
MGARRKLDGGHENEQRNSGIHGKEGFTMAEQTGSAVSREVSRARLDAGEHARRDELGWARAGKTAAGERRSREVAAREMGAMGELHSRRAGTERRGGAGGGTALGREMDLASRKPSAGELEDGRALGHGEQDGGSSVGWGWTPER

SEQ ID NO: 460 - DNA, 1857 bp, Zea mays
atgtttgacgacgcgggggccgtggcggtgaagcggatgaggctgtgggaggaggacgaggtggaagtggaggaggaggggatggaggtggacgcggagccgggatggccgtggggaacgccggcggcggggctctccagggctgcggcgatcgtcgtggcggacgcggcggagcccgacttccccgtcatatacgtcaacgccgcattcgagtccgccacggggtaccgcgcccacgaggtgctcgggcgcaactgccgattcctgcaatttcgggatccacgagcccagaggcgacatccccttgttgatcccatggtcgtttcagagatccggcgatgcctcaacgaggggattgaattccatggcgagctgctaaatttccggaaggatggcgctccactttacaacagattaagtctcattccaatgcacggggatgatggctacgtgacacatgtgattggaatccaactattctccgaggcaaacatcgatctcagcagcgtgtcgtatccggtgtacaagcaacagaccaacaacaggcccagcattcaagatctgaactcagcttcccatgagcatgctccgaaagtccagagtgcagaccactgcggtatacttcagttgtcagacgaagttctcgcacacaacattctgtctcgcctgtcacctagagatgtcgcatccattggatccgtctgtaccaggatgcatgagcttaccaagaatgatcacctgaggaagatggtctgccagaacgcgtggggaagggatgccactgtcaagcttgagatgagcaccaagatggtaggatggggccgtcttgcgagagagctaactactcttgaggccgcctcgtggaggaagttcacggttggagggcgcgtcgagccttcccgatgcaacttcagtgcctgtgctgttggtaaccgcttggtccttttcggaggggagggtgtcaacatgcagcctatggacgacacctttgtgcttaacatggaggctgcaaggccggaatggcgccgcgtgaaggtttccgcctccccaccaggccggtgggggcacactctgtcgtggctgaacgggtcatggctggtggtatttgggggctgcggacagcaaggtttgctcaatgatgtcttcgtccttgaccttgacgctcagcagccaacgtggagggaggttgcaagcgagggtcctccactgccacggtcctggcacagctcatgcaccttggatggttcgaagctggtcgtctccggtggctgcaccgagtctggcgttctcctcagcgacaccttcctgcttgacctcaccaaggagaagcctgcgtggagggaaattcccacatcttggtcacccccatcccgcctcggccacaccatgtccgtctacggtacgactaaactgctcatgttcggtgggctggcgaagagcggctcgctccggctgcgctccagcgacgcctacacgatggacgtcggcgaagatagtccgcagtggaggcagctggcgacgaccggattcccaaacgtcggcccaccgccgaggctcgatcacgttgcggtgagcctgccctgtggacggatcatcatattcggtggctccatcgcgggactccactccccggcgcagctgttcctggtcgatccagcagaggagaagccgacgtggaggatcctgaacgttcccggcaaaccccccaagttcgcctgggggcacagcacctgcgtggttggcggcactagggtcctcgtcctcggaggccacaccggggaggagtggatactgaacgagctacatgagctctgcctggcaagcaggcccgacgacgacgacgatgaccgctactga

SEQ ID NO: 461 - protein, 618 aa, Zea mays
MFDDAGAVAVKRMRLWEEDEVEVEEEGMEVDAEPGWPWGTPAAGLSRAAAIVVADAAEPDFPVIYVNAAFESATGYRAHEVLGRNCRFLQFRDPRAQRRHPLVDPMVVSEIRRCLNEGIEFHGELLNFRKDGAPLYNRLSLIPMHGDDGYVTHVIGIQLFSEANIDLSSVSYPVYKQQTNNRPSIQDLNSASHEHAPKVQSADHCGILQLSDEVLAHNILSRLSPRDVASIGSVCTRMHELTKNDHLRKMVCQNAWGRDATVKLEMSTKMVGWGRLARELTTLEAASWRKFTVGGRVEPSRCNFSACAVGNRLVLFGGEGVNMQPMDDTFVLNMEAARPEWRRVKVSASPPGRWGHTLSWLNGSWLVVFGGCGQQGLLNDVFVLDLDAQQPTWREVASEGPPLPRSWHSSCTLDGSKLVVSGGCTESGVLLSDTFLLDLTKEKPAWREIPTSWSPPSRLGHTMSVYGTTKLLMFGGLAKSGSLRLRSSDAYTMDVGEDSPQWRQLATTGFPNVGPPPRLDHVAVSLPCGRIIIFGGSIAGLHSPAQLFLVDPAEEKPTWRILNVPGKPPKFAWGHSTCVVGGTRVLVLGGHTGEEWILNELHELCLASRPDDDDDDRY

SEQ ID NO: 462 - DNA, 501 bp, Zea mays
atggacgggggatccggcaatgcctccagcggcggagcggcggtgtgctgctactacgcgctcctcggcgtccgcaagagcgcctccgccaccgacatacgcaccgcgtaccggaggctcgcgatgaagtggcacccggaccggtgggccagcgatcccggcgcggccggcgaggccaagcggcggttccagcggatccaggaggcctactcagttttatcggacaaggggaagaaggccatgtacgacgccgggctcttcgatcccctcgacgacgacgaccaggatttctccgacttcatgcaggagatgctggtgatgatggataacgtgaaaaacgagaagccggacacgctagaggacctgcagaagatgctggcggacatcgtgaacggcgacggcggggacggcgtaggcgggcgcgtgccgccggcgccgccggacgttgctcggcgaacgggggtcgcgccccacccgcagccgcagcaggggggtaggtga

SEQ ID NO: 463 - protein, 166 aa, Zea mays
MDGGSGNASSGGAAVCCYYALLGVRKSASATDIRTAYRRLAMKWHPDRWASDPGAAGEAKRRFQRIQEAYSVLSDKGKKAMYDAGLFDPLDDDDQDFSDFMQEMLVMMDNVKNEKPDTLEDLQKMLADIVNGDGGDGVGGRVPPAPPDVARRTGVAPHPQPQQGGR

SEQ ID NO: 464 - DNA, 507 bp, Zea mays
atggacggcgggggatccggcaatgcctccggcggcagcggcggcgcatcgacgtgctgctactacgcgctcctcggcatccgcaagaacgcctccgccaccgacatacgcgccgcttaccggaggctcgcgatgaagtggcacccggaccggtgggccagcgaccccggcgcggccggcgaggccaatcagcggttccagcggatccaggaggcatactccgttctgtcggacaaggggaagaaggccatgtacgacgccgggctcttcgaccccctcgacgacgacgaccaggatttctccgacttcatgcaggagatgctggtgatgatggatagcgtgaaaaacgagaagccggacacgctggaggacctgcagaagatgctggaggacatcgtgaagggcgacggcgggggcgggagcggcgcaggcgggcgggcgccgacggacggtgctcgacggacgcgcgttgcgccctacccgcagccgcagcgtgcgcgcaggtga

SEQ ID NO: 465 - protein, 168 aa, Zea mays
MDGGGSGNASGGSGGASTCCYYALLGIRKNASATDIRAAYRRLAMKWHPDRWASDPGAAGEANQRFQRIQEAYSVLSDKGKKAMYDAGLFDPLDDDDQDFSDFMQEMLVMMDSVKNEKPDTLEDLQKMLEDIVKGDGGGGSGAGGRAPTDGARRTRVAPYPQPQRARR

SEQ ID NO: 466 - DNA, 1068 bp, Zea mays
atggccaccaccgccgcgtccagcctcctcaagtcctccttcgcgggctcccggctcccttcggccacgcgcaccaccaccccgtcgtccgtggccgtggccaccccgcgcgccggcggcggccccatccgcgcgtccatctcctcctcccccaccccgccctacgacctgacgtccttccggttcagccccatcaaggagtccatcgtgtcccgcgagatgacccggcgctacatgacggacatgatcacccacgccgacaccgacgtggtgatcgtgggcgccgggtccgcgggcctgtcctgcgcgtacgagctgtccaaggaccccaccgtgagcgtggccatcgtggagcagtccgtgtccccgggcggcggcgcgtggctgggcgggcagctgttctcggccatggtggtgcgcaggccggcgcacctgttcctggacgagctgggcgtgggctacgacgaggccgaggactacgtggtggtcaagcacgcggcgctgttcacgtccaccgtgatgagccggctcctggcgcggcccaacgtgaagctgttcaacgccgtggcggtggaggacctgatcgtgcggcgggggcgcgtcggcggcgtggtcaccaactgggcgctcgtgtccatgaaccacgacacgcagtcgtgcatggaccccaacgtgatggaggccaaggtggtggtcagctcctgcggccacgacgggcccttcggcgccaccggcgtcaagaggctccaggacatcggcatgatcagcgccgtgcccgggatgaaggcgctcgacatgaacgccgccgaggacgagatcgtgcgcctcacgcgcgaggtcgtgcccggcatgatcgtcaccgggatggaggtcgccgagatcgacggcgccccgaggatgggcccgacgttcggcgccatgatgatctccggccagaaggcggcgcacctggcgctgaaggcactgggcaggcccaacgccgtggacgggaccatccccgaggtgtcgccggcgctgcgcgaggagttcgtgattgcgtccaaggacgacgaggtcgtggacgcctga

SEQ ID NO: 467 - protein, 355 aa, Zea mays
MATTAASSLLKSSFAGSRLPSATRTTTPSSVAVATPRAGGGPIRASISSSPTPPYDLTSFRFSPIKESIVSREMTRRYMTDMITHADTDVVIVGAGSAGLSCAYELSKDPTVSVAIVEQSVSPGGGAWLGGQLFSAMVVRRPAHLFLDELGVGYDEAEDYVVVKHAALFTSTVMSRLLARPNVKLFNAVAVEDLIVRRGRVGGVVTNWALVSMNHDTQSCMDPNVMEAKVVVSSCGHDGPFGATGVKRLQDIGMISAVPGMKALDMNAAEDEIVRLTREVVPGMIVTGMEVAEIDGAPRMGPTFGAMMISGQKAAHLALKALGRPNAVDGTIPEVSPALREEFVIASKDDEVVDA

SEQ ID NO: 468 - DNA, 768 bp, Zea mays
atggcgaagctcatgaacaagctggtcgattcgttcgagcacgacgagatactggacgtcggctgcgtgcgcgccgtgctggccgagctcgtcctcaccttcctcttcgtcttcaccggcgtctccgccgccatggccgccggatccgacgggaagcccggcgacgctatgccgatggcgacgctggcggcggtggcaatcgcgcacgcgctggccgctggcgtcctggtgacggccgggttccacgtctccggcggccacctgaaccccgcggtgacggtggggctcatggtgcgcggccacatcaccaagctccgggcggtgctgtacgtcgccgcccagctgctggcctcctccgccgcctgcgtcctcctccgcttcctcagcggcggcatggtgaccccggtgcacgccctgggcaggggcatcagcccgatgcagggcctggtgatggaggtcatcctcaccttctccctgctcttcgtcacctacgccatgatcctggacccgcggagccaggtccgcgccatcggcccgctgctgacgggcctcatcgtcggcgccaacagcctcgccggcggcaacttcaccggcgcgtccatgaacccggcacgctccttcggcccggccctggccaccggggactggacaaaccactgggtctactggatcggcccgctgctcggcgggcccctggcaggcttcgtgtacgagtcgctgttcctggtgcagaagatgcacgagccgctgctcaatggggaagtctga

SEQ ID NO: 469 - protein, 255 aa, Zea mays
MAKLMNKLVDSFEHDEILDVGCVRAVLAELVLTFLFVFTGVSAAMAAGSDGKPGDAMPMATLAAVAIAHALAAGVLVTAGFHVSGGHLNPAVTVGLMVRGHITKLRAVLYVAAQLLASSAACVLLRFLSGGMVTPVHALGRGISPMQGLVMEVILTFSLLFVTYAMILDPRSQVRAIGPLLTGLIVGANSLAGGNFTGASMNPARSFGPALATGDWTNHWVYWIGPLLGGPLAGFVYESLFLVQKMHEPLLNGEV

SEQ ID NO: 470 - DNA, 933 bp, Zea mays
atggcgggtggcggcgccggcgacgacgacgtggtggtggtgagctgcggcggcagaggcggcggcgaccccggcgcatacgccgcggtgctcaagaggaagctcgacctgtactgcgccgccgtcgccaaatccatggaagctaaatcacaagaacattcgttgggctaccccaactcacaagcttcagatgcttcgcaattgatttctcaagcttcctttgatggtgacatagatggggcaagcctagttacaaactctaatgtcatagaagatgatgattttcaaggcaagccaaccaacagtggcacatcaaaggaactgtcagacgatgatggtgaccttgaagagaatactgaccccgctaacgccaagaagatgaggagaatggtgtcaaaccgggaatcggctaggcgatcaagaaagaggaagcaagcacacttgaccgatcttgaatcacaggtttccaggttaacgtctgagaatgcatctttgctgaagcgactggctgatatgactcagaaatacaaggacgcttccgttgacaataaaaatctaacagttgatgttgagactatgaggagaaaggtgaacatagccgaggaagctgtcaggaggctaactgggatcaccctcatgctaccgaccgcttttgagaagcccacgagcagcgcgcccctgtcatcatgtccatctgatgcagcttctgcttctgcttctgccgccattgaagacagcgtgaagcatttcctccaggcgccacttgaaaacagtgggatcatcccaaacgcagcagtttttcagaccaagccagcttctctgcaccgtgttgctagcctggagaacctgcagaagaggatcgtcggggatgcaatgtattccgagaccgcgtcaacgacattctcagatcctgaagctcttgccgataggtaa

SEQ ID NO: 471 - protein, 310 aa, Zea mays
MAGGGAGDDDVVVVSCGGRGGGDPGAYAAVLKRKLDLYCAAVAKSMEAKSQEHSLGYPNSQASDASQLISQASFDGDIDGASLVTNSNVIEDDDFQGKPTNSGTSKELSDDDGDLEENTDPANAKKMRRMVSNRESARRSRKRKQAHLTDLESQVSRLTSENASLLKRLADMTQKYKDASVDNKNLTVDVETMRRKVNIAEEAVRRLTGITLMLPTAFEKPTSSAPLSSCPSDAASASASAAIEDSVKHFLQAPLENSGIIPNAAVFQTKPASLHRVASLENLQKRIVGDAMYSETASTTFSDPEALADR

SEQ ID NO: 472 - DNA, 8 bp, Zea mays
aaaaatct

SEQ ID NO: 473 - DNA, 8 bp, Zea mays
agattttt

SEQ ID NO: 474 - DNA, 8 bp, Zea mays
aaatatct

SEQ ID NO: 475 - DNA, 8 bp, Zea mays
agatattt

SEQ ID NO: 476 - DNA, 8 bp, Zea mays
gccacgtg

SEQ ID NO: 477 - DNA, 8 bp, Zea mays
cacgtggc

SEQ ID NO: 478 - DNA, 6 bp, Zea mays
aaccac

SEQ ID NO: 479 - DNA, 6 bp, Zea mays
gtggtt

SEQ ID NO: 480 - DNA, 5 bp, Zea mays
gccac

SEQ ID NO: 481 - DNA, 5 bp, Zea mays
gtggc

SEQ ID NO: 482 - DNA, 6 bp, Zea mays
ccacac

SEQ ID NO: 483 - DNA, 6 bp, Zea mays
gtgtgg

SEQ ID NO: 484 - DNA, 7 bp, Zea mays
ggataag

SEQ ID NO: 485 - DNA, 7 bp, Zea mays
cttatcc

SEQ ID NO: 486 - DNA, 7 bp, Zea mays
aaaccct

SEQ ID NO: 487 - DNA, 7 bp, Zea mays
agggttt

SEQ ID NO: 488 - DNA, 7 bp, Zea mays
aaagccc

SEQ ID NO: 489 - DNA, 7 bp, Zea mays
gggcttt

SEQ ID NO: 490 - DNA, 7 bp, Zea mays
atgggcc

SEQ ID NO: 491 - DNA, 7 bp, Zea mays
ggcccat

What is claimed is:

1. An isolated polynucleotide selected from the group consisting of:
a. a polynucleotide having at least 90% sequence identity, as determined by the GAP algorithm under default parameters, to the full length sequence of a polynucleotide selected from the group consisting of SEQ ID NOS: 1, 2, 3, 4, 5, 6, 7, 8, 20, 184, 186, 188, 190, 192, 194, 196, 198, 200, 202, 204, 206, 208, 210, 212, 214, 216, 218, 220, 222, 224, 226, 228, 230, 232, 234, 236, 238, 240, 242, 244, 246, 248, 250, 252, 254, 256, 258, 260, 262, 264, 266, 268, 270, 272, 274, 276, 278, 280, 282, 284, 286, 288, 290, 292, 294, 296, 298, 300, 302, 304, 306, 308, 310, 312, 314, 316, 318, 320, 322, 324, 326, 328, 330, 332, 334, 336, 338, 340, 342, 344, 346, 348, 350, 352, 354, 356, 358, 360, 362, 364, 366, 368, 370, 372, 374, 376, 378, 380, 382, 384, 386, 388, 390, 392, 394, 396, 398, 400, 402, 404, 406, 408, 410, 412, 414, 416, 418, 420, 422, 424, 426, 428, 430, 432, 434, 436, 438, 440, 442, 444, 446, 448, 450, 452, 454, 456, 458, 460, 462, 464, 466, 468 and 470; wherein the polynucleotide encodes a polypeptide that functions as a modifier of diurnal activity;
b. a polynucleotide selected from the group consisting of SEQ ID NOS: 1, 2, 3, 4, 5, 6, 7, 8, 20, 184, 186, 188, 190, 192, 194, 196, 198, 200, 202, 204, 206, 208, 210, 212, 214, 216, 218, 220, 222, 224, 226, 228, 230, 232, 234, 236, 238, 240, 242, 244, 246, 248, 250, 252, 254, 256, 258, 260, 262, 264, 266, 268, 270, 272, 274, 276, 278, 280, 282, 284, 286, 288, 290, 292, 294, 296, 298, 300, 302, 304, 306, 308, 310, 312, 314, 316, 318, 320, 322, 324, 326, 328, 330, 332, 334, 336, 338, 340, 342, 344, 346, 348, 350, 352, 354, 356, 358, 360, 362, 364, 366, 368, 370, 372, 374, 376, 378, 380, 382, 384, 386, 388, 390, 392, 394, 396, 398, 400, 402, 404, 406, 408, 410, 412, 414, 416, 418, 420, 422, 424, 426, 428, 430, 432, 434, 436, 438, 440, 442, 444, 446, 448, 450, 452, 454, 456, 458, 460, 462, 464, 466, 468 and 470;
c. a polynucleotide which is fully complementary to the polynucleotide of (a) or (b);
d. a polypeptide encoded by the polynucleotide of (a) or (b); and
e. a polypeptide having at least 90% sequence identity, as determined by the GAP algorithm under default parameters, to the full length sequence of a polypeptide selected from the group consisting of SEQ ID NOS; 185, 187, 189, 191, 193, 195, 197, 199, 201, 203, 205, 207, 209, 211, 213, 215, 217, 219, 221, 223, 225, 227, 229, 231, 233, 235, 237, 239, 241, 243, 245, 247, 249, 251, 253, 255, 257, 259, 261, 263, 265, 267, 269, 271, 273, 275, 277, 279, 281, 283, 285, 287, 289, 291, 293, 295, 297, 299, 301, 303, 305, 307, 309, 311, 313, 315, 317, 319, 321, 323, 325, 327, 329, 331, 333, 335, 357, 359, 361, 363, 365, 367, 369, 371, 373, 375, 377, 379, 381, 383, 385, 387, 389, 391, 393, 395, 397, 399, 401, 403, 405, 407, 409, 411, 413, 415, 417, 419, 421, 423, 425, 427, 429, 431, 433, 435, 437, 439, 441, 443, 445, 447, 449, 451, 453, 455, 457, 459, 461, 463, 465, 467, 467, 469 and 471.

2. A recombinant expression cassette, comprising the polynucleotide of claim 1, wherein the polynucleotide is operably linked, in sense or anti-sense orientation, to a promoter.

3. A host cell comprising the expression cassette of claim 2.

4. A transgenic plant comprising the recombinant expression cassette of claim 2.

5. The transgenic plant of claim 4, wherein said plant is a monocot.

6. The transgenic plant of claim 4, wherein said plant is a dicot.

7. The transgenic plant of claim 4, wherein said plant is selected from the group consisting of: maize, soybean, sunflower, sorghum, canola, wheat, alfalfa, cotton, rice, barley, millet, peanut, sugar cane and cocoa.

8. A transgenic seed from the transgenic plant of claim 4.

9. A method of modulating diurnal rhythm in plants, comprising:
a. introducing into a plant cell a recombinant expression cassette comprising the polynucleotide of claim 1 operably linked to a promoter; and
b. culturing the plant under plant cell growing conditions; wherein the diurnal in said plant cell is modulated.

10. The method of claim 9, wherein the plant cell is from a plant selected from the group consisting of: maize, soybean, sunflower, sorghum, canola, wheat, alfalfa, cotton, rice, barley, millet, peanut, sugar cane and cocoa.

11. A method of modulating the whole plant or diurnal rhythm in a plant, comprising:
a. introducing into a plant cell a recombinant expression cassette comprising the polynucleotide of claim 1 operably linked to a promoter;
b. culturing the plant cell under plant cell growing conditions; and
c. regenerating a plant form said plant cell; wherein the diurnal rhythm in said plant is modulated.

12. The method of claim 11, wherein the plant is selected from the group consisting of: maize, soybean, sorghum, canola, wheat, alfalfa, cotton, rice, barley, millet, peanut and cocoa.

13. A product derived from the method of processing of transgenic plant tissues expressing an isolated polynucleotide encoding a diurnally functioning gene, the method comprising:
a. transforming a plant cell with a recombinant expression cassette comprising a polynucleotide having at least 90% sequence identity to the full length sequence of a polynucleotide selected from the group consisting of SEQ ID NO: 1, 2, 3, 4, 5, 6, 7, 8, 20, 40, 184, 186, 188, 190, 192, 194, 196, 198, 200, 202, 204, 206, 208, 210, 212, 214, 216, 218, 220, 222, 224, 226, 228, 230, 232, 234, 236, 238, 240, 242, 244, 246, 248, 250, 252, 254, 256, 258, 260, 262, 264, 266, 268, 270, 272, 274, 276, 278, 280, 282, 284, 286, 288, 290, 292, 294, 296, 298, 300, 302, 304, 306, 308, 310, 312, 314, 316, 318, 320, 322, 324, 326, 328, 330, 332, 334, 336, 338, 340, 342, 344, 346, 348, 350, 352, 354, 356, 358, 360, 362, 364, 366, 368, 370, 372, 374, 376, 378, 380, 382, 384, 386, 388, 390, 392, 394, 396, 398, 400, 402, 404, 406, 408, 410, 412, 414, 416, 418, 420, 422, 424, 426, 428, 430, 432, 434, 436, 438, 440, 442, 444, 446, 448, 450, 452, 454, 456, 458, 460, 462, 464, 466, 468 and 470; operably linked to a promoter; and
b. culturing the transformed plant cell under plant cell growing conditions; wherein the growth in said transformed plant cell is modulated;
c. growing the plant cell under plant-forming conditions to express the polynucleotide in the plant tissue; and
d. processing the plant tissue to obtain a product.

14. The transgenic plant of claim 13, wherein the plant is a monocot.

15. The transgenic plant of claim 13, wherein the plant is selected from the group consisting of: maize, soybean, sunflower, sorghum, canola, wheat, alfalfa, cotton, rice, barley, sugar cane and millet.

16. The transgenic plant of claim 4, where overexpression of the polynucleotide leads to which has improved plant growth as compared to non-transformed plants.

17. The transgenic plant of claim 4, where the plant exhibits improved source-sink relationships as compared to non-transformed plants.

18. The transgenic plant of claim 4, where the plant has improved yield as compared to non-transformed plants.

19. A regulatory polynucleotide molecule comprising a sequence selected from the group consisting of: (a) SEQ ID NOS: 31-183; (b) a nucleic acid fragment that comprises at least 50-100 contiguous nucleotides of one of SEQ ID NOS: 31-183 and wherein the fragment comprises one or more of the diurnal regulatory elements listed in Table 2 and (c) a nucleic acid sequence comprising at least 90% identity to about 500-1000 contiguous nucleotides of one of SEQ ID NOS: 31-183 as determined by the GAP algorithm under default parameters.

20. A chimeric polynucleotide molecule comprising the nucleic acid fragment of claim 19.

21. The chimeric molecule of claim 20 comprises the diurnal regulatory element and a tissue specific expression element.

22. The chimeric molecule of claim 21, wherein the tissue specific expression element is selected from the group consisting of root specific, bundle sheath cell specific, leaf specific and embryo specific.

23. The regulatory polynucleotide molecule of claim 19, wherein said regulatory polynucleotide molecule is a promoter.

24. A construct comprising the regulatory molecule of claim 19 operably linked to a heterologous polynucleotide molecule, wherein the heterologous molecule confers a trait of interest.

25. The construct of claim 24, wherein the trait of interest is selected from the group consisting of drought tolerance, freezing tolerance, chilling or cold tolerance, disease resistance and insect resistance.

26. The construct of claim 24, wherein the heterologous molecule functions in source-sink metabolism.

27. A transgenic plant transformed with the regulatory molecule of claim 19.

28. The transgenic plant of claim 27 is monocotyledonous.

29. The transgenic plant of claim 27 is selected from the group consisting of maize, soybean, canola, cotton, sunflower, alfalfa, sugar beet, wheat, rye, rice, sugarcane, oat, barley, turf grass, sorghum, millet, tomato, pigeon pea, vegetable, fruit tree and forage grass.

30. A method of increasing yield of a plant, the method comprising expressing a heterologous polynucleotide of interest under the control of the regulatory molecule of claim 19.

31. The method of claim 30, wherein the heterologous polynucleotide is a diurnally regulated plant gene.

32. A method of increasing abiotic stress tolerance in a plant, the method comprising expressing one or more polynucleotides that confer abiotic stress tolerance in plants under the control of the regulatory molecule of claim 19.

33. The method of claim 32, wherein the abiotic stress tolerance is selected from the group consisting of drought tolerance, freezing tolerance and chilling or cold tolerance.

34. The method of claim 33, wherein the polynucleotide that confers drought tolerance is expressed under the control of a regulatory element whose peak expression is around mid-day or late afternoon.

35. The method of claim 33, wherein the polynucleotide that confers freezing or cold tolerance is expressed under the control of a regulatory element whose peak expression is around dawn or mid-morning.

36. A method of reducing yield drag of transgenic gene expression, the method comprising expressing a transgene operably linked to a regulatory polynucleotide molecule comprising a sequence selected from the group consisting of: (a) SEQ ID NOS: 31-183; (b) a nucleic acid fragment that comprises at least 50-100 contiguous nucleotides of one of SEQ ID NOS: 31-183 and wherein the fragment comprises one or more of the diurnal regulatory elements listed in Table 2 and (c) a nucleic acid sequence comprising at least 90% identity to about 500-1000 contiguous nucleotides of one of SEQ ID NOS: 31-183 as determined by the GAP algorithm under default parameters.

37. A method of screening for gene candidates involved in abiotic stress tolerance, the method comprising (a) identifying one or more gene candidates that exhibit yield drag under constitutive or tissue specific expression and (b) expressing the gene candidates under the control of the a regulatory molecule that directs diurnal expression pattern.

38. The method of claim 37, wherein the regulatory molecule comprises a sequence selected from the group consisting of: (a) SEQ ID NOS: 31-183; (b) a nucleic acid fragment that comprises at least 50-100 contiguous nucleotides of one of SEQ ID NOS: 31-183 and wherein the fragment comprises one or more of the diurnal regulatory elements listed in Table 2 and (c) a nucleic acid sequence comprising at least 90% identity to about 500-1000 contiguous nucleotides of one of SEQ ID NOS: 31-183 as determined by the GAP algorithm under default parameters.
